(19) United States
(12) Patent Application Publication
(10) Pub. No.: US 2004/0013687 A1
(43) Pub. Date: Jan. 22, 2004

(54) Compositions and methods for transepithelial molecular transport

(75) Inventors: Lance Simpson, Moorestown, NJ (US); Andrew Maksymowych, Gulph Mills, PA (US); Jung-Beak Park, Philadelphia, PA (US)

Correspondence Address: AKIN GUMP STRAUSS HAUER & FELD L.L.P., ONE COMMERCE SQUARE, 2005 MARKET STREET, SUITE 2200, PHILADELPHIA, PA, 19103-7013, US

(73) Assignee: Thomas Jefferson University

(21) Appl. No.: 10/452,024

(22) Filed: Jun. 2, 2003

Related U.S. Application Data
(60) Provisional application No. 60/384,949, filed on May 31, 2002.

(51) Int. Cl. A61K 39/02

(52) U.S. Cl. 424/190.1

(57) ABSTRACT

The invention relates to fragments of Clostridium botulinum HC that can be linked with an entity (e.g., an antigen, a particle, or a radionuclide) and used to deliver the entity across a non-keratinized epithelial membrane of an animal. The fragments are useful, for example, for making vaccines, antidotes, and anti-toxins and in situations in which rapid uptake of an agent by an animal is desired.

### CROSS-REFERENCE TO RELATED APPLICATIONS

[0001] This application claims priority under 35 U.S.C. § 119(e) to U.S. provisional patent application serial No. 60/384,949, filed May 31, 2002, the contents of which are incorporated herein by reference.

### STATEMENT REGARDING FEDERALLY SPONSORED RESEARCH OR DEVELOPMENT

[0002] This research was supported in part by U.S. Government funds (National Institutes of Health grant number GM057342).

### BACKGROUND OF THE INVENTION

[0003] Botulinum toxin is the causative agent of botulism and other disorders in humans and other animals (e.g., other mammals, reptiles, birds, and amphibians). The pathological effects of this agent are mediated by a neurotoxin that is able to cross the gut and airway epithelium to enter the general circulation. Once in the circulation, botulinum neurotoxin (“BoNT”) is able to bind to the presynaptic membrane of neuromuscular junctions and thereafter enter the neuronal cytosol. In the cytosol, BoNT blocks neuronal release of acetylcholine at the neuromuscular junction, causing flaccid paralysis of the muscle.

[0004] BoNT is synthesized as a single-chain inactive propolypeptide having a molecular mass of approximately 150 kilodaltons. Inactive pro-BoNT is activated by proteolytic cleavage of the pro-BoNT by endogenous or exogenous proteases. Cleavage (“nicking”) of the inactive BoNT propeptide yields two polypeptide chains, a heavy chain (“HC”) and a light chain (“LC”). The HC and LC normally remain linked by a disulfide bond that can be severed under reducing conditions, such as those that exist in the interior of an animal cell.

[0005] Several species of Clostridia are presently known to produce the BoNT toxin, including Clostridium botulinum, Clostridium baratii, and Clostridium butyricum.

[0006] BoNT is presently known to be produced in seven immunologically distinct forms, A, B, C, D, E, F, and G. In nature, each serotype is released from clostridia in association with two classes of proteins (sometimes referred to as the “auxiliary proteins”): (i) a family of hemagglutinins (“HA”) and (ii) a single, nontoxin, non-hemagglutinin protein (“NTNH”).

[0007] BoNT is known to be able to penetrate gut, pulmonary, and other epithelial membranes in order to gain access to the bloodstream. In the bloodstream, BoNT is able to enter neurons at the neuromuscular junction, whereupon the toxin can manifest its characteristic effects.

[0008] The ability of BoNT molecules altered such that some or all of the LC has been deleted to cross epithelial membranes has been described (e.g., U.S. Pat. No. 6,051,239). However, those molecules require production or isolation of intact HC, which has proven impractical for various reasons. Others have attempted to prepare injectable vaccines for preventing botulism using fragments of BoNTs. However, none describes vaccines that prevent botulism which are capable of transcytosing across epithelia.

[0009] A need remains for improved compositions and methods for delivering antigens, drugs, imaging agents, radionuclides, and other agents to the bodies of animals via the epithelium. The invention satisfies this need, at least in part, by providing compositions and methods for delivering entities across animal epithelial membranes.

### BRIEF SUMMARY OF THE INVENTION

[0010] The invention is based on the discovery that carboxyterminal fragments of the HC of Clostridium botulinum neurotoxin (BoNT) have the ability to cross epithelial membranes in animals. A surprising further discovery is that fragments of the HC of BoNT are able to mediate transepithelial transport of a wide range of entities when an entity is linked to the fragment. Thus, the invention relates to compositions that comprise a carboxyterminal fragment of a HC of BoNT (hereinafter “HC”) linked to an entity. The invention also relates to methods of using such compositions.

[0011] In particular, the invention provides a composition for translocating an entity across a non-keratinized epithelium of an animal. The composition comprises an entity linked to a carboxyterminal fragment of the HC of a BoNT. The size of the entity is preferably not greater than the lumenal capacity of vesicles of cells of the epithelium. The selected entity for use in the composition of the invention may be immunogenic, therapeutic, and/or diagnostic in nature.

[0012] For example, within the scope of the invention is contemplated a composition that elicits an immune response (mucosal or systemic) against an antigen in a vertebrate. Such composition may contain at least one epitope of the antigen linked to a carboxyterminal fragment of the HC of a BoNT. The size of the epitope is preferably not greater than the lumenal capacity of vesicles of cells of the epithelium.

[0013] In an embodiment, the invention is a vaccine that includes an antigen linked to a carboxyterminal fragment of HC of a BoNT, wherein the antigen induces protective immunity against a pathogen of a vertebrate when the antigen is delivered to the circulation of the vertebrate. For example, the vaccine may comprise an antigen linked to a carboxyterminal fragment of a HC of a BoNT, wherein the antigen induces protective immunity against Clostridium botulinum neurotoxin in a vertebrate when the antigen is delivered to the circulation of the vertebrate.

[0014] In another aspect of the invention, a method of translocating an entity across a non-keratinized epithelium of an animal is provided. The method includes contacting an epithelium with a composition comprising the entity linked to a carboxyterminal fragment of the HC of a BoNT, wherein the size of the entity is not greater than the lumenal capacity of vesicles of cells of the epithelium.

[0015] Also contemplated are methods of inducing an immune response against an entity in a vertebrate. In such case, the methods involves: a) linking the entity to a carboxyterminal fragment of the HC of a BoNT, wherein the size of the entity is not greater than the lumenal capacity of vesicle cells of the epithelium; and b) contacting the fragment-linked entity with the epithelium.

[0016] Pharmaceutical compositions containing an entity linked to a carboxyterminal fragment of the HC of BoNT are also described herein, as are foodstuffs and translocating polypeptides that may be used in the methods and/or compositions of the invention.

### BRIEF DESCRIPTION OF THE SEVERAL VIEWS OF THE DRAWINGS

[0017] The foregoing summary, as well as the following detailed description of the invention, will be better understood when read in conjunction with the appended drawings. For the purpose of illustrating the invention, there is shown in the drawings embodiments which may be presently preferred. It should be understood, however, that the invention is not limited to the precise arrangements, sequences, compounds, and instrumentalities shown.

[0018] FIG. 1 (consisting of FIGS. 1A to 1BB) is an alignment of the amino acid sequences of the Clostridium botulinum neurotoxin:

[0019] (i) serotype A HC (SEQ ID NO: 1, from GENBANK™ accession no. Q45894);

[0020] (ii) serotype B HC (SEQ ID NO: 2, from GENBANK™ accession no. P10844);

[0021] (iii) serotype C HC (SEQ ID NO: 3, from GENBANK™ accession no. P18640);

[0022] (iv) serotype D HC (SEQ ID NO: 4, from GENBANK™ accession no. P19321);

[0023] (v) serotype E HC (SEQ ID NO: 5, from GENBANK™ accession no. P30995);

[0024] (vi) serotype F HC (SEQ ID NO: 6, from GENBANK™ accession no. P30996); and

[0025] (vii) serotype G HC (SEQ ID NO: 7, from GENBANK™ accession no. Q60393). In the alignment, the amino acid sequence of the 88 kilodalton fragment of HC (serotype A) (SEQ ID NO: 8) (i.e., the fragment herein designated “88 kHC”, beginning at residue 524) is shown in bold text. The amino acid sequence of the 66 kilodalton fragment of HC (serotype A) (SEQ ID NO: 9) (i.e., the fragment herein designated “66 kHC”, beginning at residue 714) is shown in underlined text (part of which is doubly-underlined). The amino acid sequence of the 50 kilodalton fragment of HC (serotype A) (SEQ ID NO: 10) (i.e., the fragment herein designated “50 kHC”, beginning at residure 886) is shown in doubly-underlined text and the amino acid sequence of a forty-eight kilodalton portion of HC (serotype A) (SEQ ID NO: 169) (i.e., the 50 kHC fragment minus 2 kilodalton of its carboxy terminus, hereinafter designated “48 kHC”, beginning at residue 886 and ending at residue 1343) is shown in italicized text.

[0026] FIG. 2 is a schematic diagram illustrating the structure of native Clostridium botulinum (serotype A), its HC, and the relative positions of each of the fragments designated 88 kHC, 66 kHC, 50 kHC, and of the portion designated 48 kHC.

[0027] FIG. 3 is a Western blot of native botulinum neurotoxin type A (BoNT A) transcytosed in polarized gut epithelial cell cultures (T-84). The lanes represent: (A) Pre-transcytosis control for native toxin. (B) Native toxin transcytosed through T-84 cells (collected from basal chamber).

[0028] FIG. 4 is a Western blot of native botulinum neurotoxin type A transcytosed in polarized, canine kidney epithelial cell cultures (MDCK). The lanes represent: (A) Pre-transcytosis control for native toxin. (B) Native toxin transcytosed through MDCK cells (collected from basal chamber).

[0029] FIG. 5 is a Western blot of HC (HC) transcytosed in T-84 polarized epithelial cell cultures. The lanes represent: (A) Pre-transcytosis control for HC. (B) HC transcytosed through T-84 cells (collected from basal chamber).

[0030] FIG. 6 is a Western blot of HC transcytosed in polarized, canine kidney epithelial cell cultures (MDCK). The lanes represent: (A) Pre-transcytosis control for HC. (B) HC transcytosed through MDCK cells (collected from basal chamber).

[0031] FIG. 7 is a Western blot of 66 kDa HC carboxyterminal fragment (66 kHC) transcytosed in T-84 polarized epithelial cell cultures. The lanes represent: (A) Pre-transcytosis control for the 66 kHC. (B) The 66 kHC transcytosed through T-84 cells (collected from basal chamber).

[0032] FIG. 8 is a Western blot of 66 kDa HC carboxyterminal fragment (66 kHC) transcytosed in MDCK polarized canine kidney epithelial cell cultures. The lanes represent: (A) Pre-transcytosis control for the 66 kHC. (B) The 66 kHC transcytosed through MDCK cells (collected from basal chamber).

[0033] FIG. 9 is a Western blot of 50 kDa HC fragment (50 kHC) transcytosed in polarized epithelial cell cultures. The lanes represent: (A) Pre-transcytosis control for 50 kHC. (B) 50 kHC transcytosed through T-84 cells (collected from basal chamber).

[0034] FIG. 10 is a Western blot of 50 kHC fragment transcytosed in polarized, canine kidney epithelial cell cultures. The lanes represent: (A) Pre-transcytosis control for 50 kHC. (B) 50 kHC transcytosed through MDCK cells (collected from basal chamber).

[0035] FIG. 11 is a fluorescence emission spectrum of Alexa 568˜Botulinum toxin type A transcytosis in polarized T-84 epithelial cell cultures. In the Figure: ⋄=Alexa 568˜toxin;□=Culture medium.

[0036] FIG. 12 is a fluorescence emission spectrum of Alexa 568˜Botulinum toxin type A transcytosis in polarized MDCK epithelial cell cultures. In the Figure: ⋄=Alexa 568˜toxin; □=Culture medium.

[0037] FIG. 13 is a Western blot of biotin˜50 kHC transcytosed in polarized T-84 epithelial cell cultures. The lanes represent: (A) Pre-transcytosis control for biotin˜50 kHC. (B) biotin˜50 kHC transcytosed through T-84 cells (collected from basal chamber).

[0038] FIG. 14 is a Western blot of biotin˜50 kHC transcytosed in polarized MDCK epithelial cell cultures. The lanes represent: (A) Pre-transcytosis control for biotin˜50 kHC. (B) Biotin˜50 kHC transcytosed through MDCK cells (collected from basal chamber).

[0039] FIG. 15 is a fluorescence emission spectrum of GFP˜66 kHC transcytosis in polarized T-84 epithelial cell cultures. In the Figure: ●=GFP˜66 kHC; O=Culture medium.

[0040] FIG. 16 is a fluorescence emission spectrum of GFP˜66 kHC transcytosis in polarized MDCK epithelial cell cultures. In the Figure: ●=GFP˜66 kHC; O=Culture medium.

[0041] FIG. 17 is a Western blot of a S-Tag˜50 kHC conjugate transcytosed in T-84 polarized epithelial cell cultures. The lanes represent: (A) Pre-transcytosis control for the S-Tag˜50 kHC. (B) The S-Tag˜50 kHC transcytosed through T-84 cells (collected from basal chamber).

[0042] FIG. 18 is a Western blot of a S-Tag˜50 kHC conjugate transcytosed in MDCK polarized canine kidney epithelial cell cultures. The lanes represent: (A) Pre-transcytosis control for the S-Tag˜50 kHC. (B) The S-Tag˜50 kHC transcytosed through MDCK cells (collected from basal chamber).

[0043] FIG. 19 is a Western blot of GST˜88 kHC transcytosed in polarized T-84 epithelial cell cultures. The lanes represent: (A) Pre-transcytosis control for the GST˜88 kHC. (B) The GST˜88 kHC transcytosed through T-84 cells (collected from basal chamber).

[0044] FIG. 20 is a Western blot of GST˜88 kHC transcytosed in polarized MDCK epithelial cell cultures. The lanes represent: (A) Pre-transcytosis control for the GST˜88 kHC. (B) The GST˜88 kHC fragment fusion transcytosed through MDCK cells (collected from basal chamber).

[0045] FIG. 21 is a Western blot of GST˜66 kHC transcytosed in polarized T-84 epithelial cell cultures. The lanes represent: (A) Pre-transcytosis control for the GST˜66 kHC. (B) The GST˜66 kHC transcytosed through T-84 cells (collected from basal chamber).

[0046] FIG. 22 is a Western blot of GST˜66 kHC transcytosed in polarized MDCK epithelial cell cultures. The lanes represent: (A) Pre-transcytosis control for the GST˜66 kHC. (B) The GST˜66 kHC transcytosed through MDCK cells (collected from basal chamber).

[0047] FIG. 23 illustrates the blood level of botulinum neurotoxin serotype A after intranasal administration to mice.

[0048] FIG. 24 illustrates the blood level of serotype A HC after intranasal administration to mice.

[0049] FIG. 25 illustrates the blood level of 6×His-50 kHC after intranasal administration to mice.

[0050] FIG. 26 illustrates the blood level of GST˜50 kHC after intranasal administration to mice.

[0051] FIG. 27 is a Western blot of GST˜50 kHC fragment probed with immune serum obtained from mice immunized intranasally with GST˜50 kHC.

[0052] FIG. 28 illustrates enhanced immune responses for intranasal administration of 50 kHC by co-administration with cholera toxin B subunit (CTB). In the Figure: ▪=50 kHC; □=50 kHC +CTB.

[0053] FIG. 29 illustrates the development of a specific antibody response to 100 kDa HC after oral immunization in mice. ELISA titers obtained seven days after the second (boost 1), third (boost 2), and fourth (boost 3) administration of 100 kDa HC are shown.

[0054] FIG. 30, which consists of FIGS. 30A to 30C, is an alignment of the amino acid sequences of several seventeen kilodalton (17 kDa) hemagglutinin (“HA”) proteins associated with the botulinum toxin of various serotypes:

[0055] (1) 17 kDa HA, GENEBANK™ Accession No. CAA44260, SEQ ID NO: 20;

[0056] (2) 17 kDA HA, GENEBANK™ Accession No. BAA75081, SEQ ID NO: 21;

[0057] (3) 17 kDa HA, GENEBANK™ Accession No. P46083, SEQ ID NO: 22;

[0058] (4) 17 kDa HA, GENEBANK™ Accession No. BAA90658, SEQ ID NO: 23;

[0059] (5) 17 kDa HA, GENEBANK™ Accession No. BAB71742, SEQ ID NO: 24;

[0060] (6) 17 kDa HA, GENEBANK™ Accession No. BAA89710, SEQ ID NO: 25;

[0061] (7) 17 kDa HA, GENEBANK™ Accession No. S49104, SEQ ID NO: 26;

[0062] (8) 17 kDa HA, GENEBANK™ Accession No. AAA99056, SEQ ID NO: 27;

[0063] (9) 17 kDa HA, GENEBANK™ Accession No. CAA70496, SEQ ID NO: 28;

[0064] (10) 17 kDa HA, GENEBANK™ Accession No. AAB42188, SEQ ID NO: 29;

[0065] (11) 17 kDa HA, GENEBANK™ Accession No. CAA61226, SEQ ID NO: 30;

[0066] (12) 17 kDa HA, GENEBANK™ Accession No. B44644, SEQ ID NO: 31;

[0067] (13) 17 kDa HA, GENEBANK™ Accession No. AAB21357, SEQ ID NO: 32;

[0068] (14) 17 kDa HA, GENEBANK™ Accession No. S67990, SEQ ID NO: 33; and

[0069] (15) 17 kDa HA, GENEBANK™ Accession No. AAB21356, SEQ ID NO: 34.

[0070] FIG. 31, which consists of FIGS. 31A to 31D, is an alignment of the amino acid sequences of several twenty-one kilodalton (21 kDa) hemagglutinin (“HA”) proteins associated with the botulinum toxin of various serotypes:

[0071] (1) 21 kDa HA, GENEBANK™ Accession No. CAA55717, SEQ ID NO: 35;

[0072] (2) 21 kDa HA, GENEBANK™ Accession No. S68219, SEQ ID NO: 36;

[0073] (3) 21 kDa HA, GENEBANK™ Accession No. AAB42190, SEQ ID NO: 37;

[0074] (4) 21 kDa HA, GENEBANK™ Accession No. S58864, SEQ ID NO: 38;

[0075] (5) 21 kDa HA, GENEBANK™ Accession No. AAB64349, SEQ ID NO: 39;

[0076] (6) 21 kDa HA, GENEBANK™ Accession No. S58856, SEQ ID NO: 40;

[0077] (7) 21 kDa HA, GENEBANK™ Accession No. NB_{—}783832, SEQ ID NO: 41;

[0078] (8) 21 kDa HA, GENEBANK™ Accession No. CAA07094, SEQ ID NO: 42;

[0079] (9) 21 kDa HA, GENEBANK™ Accession No. CAA61227, SEQ ID NO : 43;

[0080] (10) 21 kDa HA, GENEBANK™ Accession No. CAA73969, SEQ ID NO: 44;

[0081] (11) 21 kDa HA, GENEBANK™ Accession No. CAA65350, SEQ ID NO: 45;

[0082] (12) 21 kDa HA, GENEBANK™ Accession No. CAA65347, SEQ ID NO: 46;

[0083] (13) 21 kDa HA, GENEBANK™ Accession No. CAA65345, SEQ ID NO: 47;

[0084] (14) 21 kDa HA, GENEBANK™ Accession No. BAA90656, SEQ ID NO: 48;

[0085] (15) 21 kDa HA, GENEBANK™ Accession No. BAA89708, SEQ ID NO: 49;

[0086] (16) 21 kDa HA, GENEBANK™ Accession No. S46426, SEQ ID NO: 50;

[0087] (17) 21 kDa HA, GENEBANK™ Accession No. CAA65346, SEQ ID NO: 51;

[0088] (18) 21 kDa HA, GENEBANK™ Accession No. BAA75074, SEQ ID NO: 52;

[0089] (19) 21 kDa HA, GENEBANK™ Accession No. BAB71744, SEQ ID NO: 53;

[0090] (20) 21 kDa HA, GENEBANK™ Accession No. CAC 19890, SEQ ID NO: 54;

[0091] (21) 21 kDa HA, GENEBANK™ Accession No. NP_{—}781286, SEQ ID NO: 55;

[0092] (22) 21 kDa HA, GENEBANK™ Accession No. JC5340, SEQ ID NO: 56; and

[0093] (23) 21 kDa HA, GENEBANK™ Accession No. AAK17956, SEQ ID NO: 57.

[0094] FIG. 32, which consists of FIGS. 32A to 32I, is an alignment of the amino acid sequences of several thirty-five kilodalton (35 kDa) hemagglutinin (“HA”) proteins associated with the botulinum toxin of various serotypes:

[0095] (1) 35 kDa HA, GENEBANK™ Accession No. AAA99055, SEQ ID NO: 58;

[0096] (2) 35 kDa HA, GENEBANK™ Accession No. S58865, SEQ ID NO: 59;

[0097] (3) 35 kDa HA, GENEBANK™ Accession No. CAA73965, SEQ ID NO: 60;

[0098] (4) 35 kDa HA, GENEBANK™ Accession No. H44644, SEQ ID NO: 61;

[0099] (5) 35 kDa HA, GENEBANK™ Accession No. S58857, SEQ ID NO: 62;

[0100] (6) 35 kDa HA, GENEBANK™ Accession No. AAB42189, SEQ ID NO: 63;

[0101] (7) 35 kDa HA, GENEBANK™ Accession No. CAA74632, SEQ ID NO: 64;

[0102] (8) 35 kDa HA, GENEBANK™ Accession No. BAB71747, SEQ ID NO: 65;

[0103] (9) 35 kDa HA, GENEBANK™ Accession No. BAA75077, SEQ ID NO: 66;

[0104] (10) 35 kDa HA, GENEBANK™ Accession No. S46429, SEQ ID NO: 67;

[0105] (11) 35 kDa HA, GENEBANK™ Accession No. P46084, SEQ ID NO: 68;

[0106] (12) 35 kDa HA, GENEBANK™ Accession No. BAA90659, SEQ ID NO: 69;

[0107] (13) 35 kDa HA, GENEBANK™ Accession No. BAA89711, SEQ ID NO: 70;

[0108] and

[0109] (14) 35 kDa HA, GENEBANK™ Accession No. CAA61226, SEQ ID NO: 71.

[0110] FIG. 33, which consists of FIGS. 33A to 33J, is an alignment of the amino acid sequences of several seventy kilodalton (70 kDa) hemagglutinin (“HA”) proteins associated with the botulinum toxin of various serotypes:

[0111] (1) 70 kDa HA, GENEBANK™ Accession No. BAA89709, SEQ ID NO: 72;

[0112] (2) 70 kDa HA, GENEBANK™ Accession No. BAA90657, SEQ ID NO: 73;

[0113] (3) 70 kDa HA, GENEBANK™ Accession No. AAB42187, SEQ ID NO: 74;

[0114] (4) 70 kDa HA, GENEBANK™ Accession No. AAM75949, SEQ ID NO: 75;

[0115] (5) 70 kDa HA, GENEBANK™ Accession No. CAA70495, SEQ ID NO: 76;

[0116] (6) 70 kDa HA, GENEBANK™ Accession No. CAA73963, SEQ ID NO: 77;

[0117] (7) 70 kDa HA, GENEBANK™ Accession No. CAA61225, SEQ ID NO: 78;

[0118] (8) 70 kDa HA, GENEBANK™ Accession No. CAA75931, SEQ ID NO: 79;

[0119] (9) 70 kDa HA, GENEBANK™ Accession No. QLCLBF, SEQ ID NO: 80;

[0120] (10) 70 kDa HA, GENEBANK™ Accession No. AAA72120, SEQ ID NO: 81;

[0121] (11) 70 kDa HA, GENEBANK™ Accession No. CAA04327, SEQ ID NO: 82;

[0122] (12) 70 kDa HA, GENEBANK™ Accession No. CAA57443, SEQ ID NO: 83;

[0123] (13) 70 kDa HA, GENEBANK™ Accession No. AAA99057, SEQ ID NO: 84;

[0124] (14) 70 kDa HA, GENEBANK™ Accession No. P01558, SEQ ID NO: 85;

[0125] (15) 70 kDa HA, GENEBANK™ Accession No. BAA07575, SEQ ID NO: 170;

[0126] (16) 70 kDa HA, GENEBANK™ Accession No. P46085, SEQ ID NO: 171;

[0127] and

[0128] (17) 70 kDa HA, GENEBANK™ Accession No. BAA75075, SEQ ID NO: 188.

[0129] FIG. 34, which consists of FIGS. 34A to 34AA, is an alignment of the amino acid sequences of several nontoxin, non-hemagglutinin protein (“NTNH”) proteins associated with the botulinum toxin of various serotypes:

[0130] (1) NTNH, GENEBANK™ Accession No. CAA55073, SEQ ID NO: 86;

[0131] (2) NTNH, GENEBANK™ Accession No. CAA73967, SEQ ID NO: 87;

[0132] (3) NTNH, GENEBANK™ Accession No. CAA55074, SEQ ID NO: 88;

[0133] (4) NTNH, GENEBANK™ Accession No. AAB64350, SEQ ID NO: 89;

[0134] (5) NTNH, GENEBANK™ Accession No. CAA61125, SEQ ID NO: 90;

[0135] (6) NTNH, GENEBANK™ Accession No. CAA74634, SEQ ID NO: 91;

[0136] (7) NTNH, GENEBANK™ Accession No. S68218, SEQ ID NO: 92;

[0137] (8) NTNH, GENEBANK™ Accession No. CAA63550, SEQ ID NO: 93;

[0138] (9) NTNH, GENEBANK™ Accession No. AAB42191, SEQ ID NO: 94;

[0139] (10) NTNH, GENEBANK™ Accession No. CAA61228, SEQ ID NO: 95;

[0140] (11) NTNH, GENEBANK™ Accession No. BAA90660, SEQ ID NO: 96;

[0141] (12) NTNH, GENEBANK™ Accession No. BAA89712, SEQ ID NO: 97;

[0142] (13) NTNH, GENEBANK™ Accession No. BAB71748, SEQ ID NO: 98;

[0143] (14) NTNH, GENEBANK™ Accession No. BAA75083, SEQ ID NO: 99;

[0144] (15) NTNH, GENEBANK™ Accession No. S46430, SEQ ID NO: 100;

[0145] (16) NTNH, GENEBANK™ Accession No. AAB36016, SEQ ID NO: 101;

[0146] (17) NTNH, GENEBANK™ Accession No. P46081, SEQ ID NO: 102;

[0147] (18) NTNH, GENEBANK™ Accession No. JC4901, SEQ ID NO: 103;

[0148] (19) NTNH, GENEBANK™ Accession No. BAA12299, SEQ ID NO: 104;

[0149] (20) NTNH, GENEBANK™ Accession No. CAA74630, SEQ ID NO: 105;

[0150] (21) NTNH, GENEBANK™ Accession No. CAA61123, SEQ ID NO: 106;

[0151] (22) NTNH, GENEBANK™ Accession No. CAA67511, SEQ ID NO: 107;

[0152] (23) NTNH, GENEBANK™ Accession No. CAA61233, SEQ ID NO: 108;

[0153] (24) NTNH, GENEBANK™ Accession No. AAC60474, SEQ ID NO: 109;

[0154] (25) NTNH, GENEBANK™ Accession No.I40644, SEQ ID NO: 110;

[0155] (26) NTNH, GENEBANK™ Accession No. CAA7397 1, SEQ ID NO: 111;

[0156] (27) NTNH, GENEBANK™ Accession No. CAA72807, SEQ ID NO: 112;

[0157] (28) NTNH, GENEBANK™ Accession No. P46082, SEQ ID NO: 113;

[0158] (29) NTNH, GENEBANK™ Accession No. A47708, SEQ ID NO: 114;

[0159] (30) NTNH, GENEBANK™ Accession No. Q06366, SEQ ID NO: 115;

[0160] (31) NTNH, GENEBANK™ Accession No. AAM75953, SEQ ID NO: 116;

[0161] (32) NTNH, GENEBANK™ Accession No. I40631, SEQ ID NO: 117;

[0162] (33) NTNH, GENEBANK™ Accession No. P10844, SEQ ID NO: 118;

[0163] (34) NTNH, GENEBANK™ Accession No. 1EPWA, SEQ ID NO: 119;

[0164] (35) NTNH, GENEBANK™ Accession No. BAA75078, SEQ ID NO: 120;

[0165] (36) NTNH, GENEBANK™ Accession No. AAL11498, SEQ ID NO: 121;

[0166] (37) NTNH, GENEBANK™ Accession No. AAK97132, SEQ ID NO: 122;

[0167] (38) NTNH, GENEBANK™ Accession No. CAA73968, SEQ ID NO: 123;

[0168] (39) NTNH, GENEBANK™ Accession No. P30995, SEQ ID NO: 124;

[0169] (40) NTNH, GENEBANK™ Accession No. BAC05434, SEQ ID NO: 125;

[0170] (41) NTNH, GENEBANK™ Accession No. BAB12249, SEQ ID NO: 126;

[0171] (42) NTNH, GENEBANK™ Accession No. BAB03512, SEQ ID NO: 127;

[0172] (43) NTNH, GENEBANK™ Accession No. S21178, SEQ ID NO: 128;

[0173] (44) NTNH, GENEBANK™ Accession No. Q00496, SEQ ID NO: 129;

[0174] (45) NTNH, GENEBANK™ Accession No. Q45894, SEQ ID NO: 130;

[0175] (46) NTNH, GENEBANK™ Accession No. CAA65352, SEQ ID NO: 131;

[0176] (47) NTNH, GENEBANK™ Accession No. CAA65348, SEQ ID NO: 132;

[0177] (48) NTNH, GENEBANK™ Accession No. AAB22656, SEQ ID NO: 133;

[0178] (49) NTNH, GENEBANK™ Accession No. CAA71744, SEQ ID NO: 134;

[0179] (50) NTNH, GENEBANK™ Accession No. A49777, SEQ ID NO: 135;

[0180] (51) NTNH, GENEBANK™ Accession No. P18640, SEQ ID NO: 136;

[0181] (52) NTNH, GENEBANK™ Accession No. 1F83A, SEQ ID NO: 137;

[0182] (53) NTNH, GENEBANK™ Accession No. 1F82A, SEQ ID NO: 138;

[0183] (54) NTNH, GENEBANK™ Accession No. BAA89713, SEQ ID NO: 139;

[0184] (55) NTNH, GENEBANK™ Accession No. BAA08418, SEQ ID NO: 140;

[0185] (56) NTNH, GENEBANK™ Accession No. A49928, SEQ ID NO: 141;

[0186] (57) NTNH, GENEBANK™ Accession No. BAC22064, SEQ ID NO: 142;

[0187] (58) NTNH, GENEBANK™ Accession No. 1906297A, SEQ ID NO: 143;

[0188] (59) NTNH, GENEBANK™ Accession No. AAC37720, SEQ ID NO: 144;

[0189] (60) NTNH, GENEBANK™ Accession No. NP_{—}783831, SEQ ID NO: 145;

[0190] (61) NTNH, GENEBANK™ Accession No. S39791, SEQ ID NO: 146;

[0191] (62) NTNH, GENEBANK™ Accession No. 1906297B, SEQ ID NO: 147;

[0192] (63) NTNH, GENEBANK™ Accession No. CAA37321, SEQ ID NO: 148;

[0193] (64) NTNH, GENEBANK™ Accession No. AAK72964, SEQ ID NO: 149;

[0194] (65) NTNH, GENEBANK™ Accession No. Q60393, SEQ ID NO: 150;

[0195] (66) NTNH, GENEBANK™ Accession No. AA021363, SEQ ID NO: 151;

[0196] (67) NTNH, GENEBANK™ Accession No. AAA23210, SEQ ID NO: 152;

[0197] (68) NTNH, GENEBANK™ Accession No. CAA61124, SEQ ID NO: 153;

[0198] (69) NTNH, GENEBANK™ Accession No. AAL66183, SEQ ID NO: 154;

[0199] (70) NTNH, GENEBANK™ Accession No. 1717342A, SEQ ID NO: 155;

[0200] (71) NTNH, GENEBANK™ Accession No. S33411, SEQ ID NO: 156;

[0201] (72) NTNH, GENEBANK™ Accession No. 3BTAA, SEQ ID NO: 157;

[0202] (73) NTNH, GENEBANK™ Accession No. CAA36289, SEQ ID NO: 158;

[0203] (74) NTNH, GENEBANK™ Accession No. P10845, SEQ ID NO: 159;

[0204] (75) NTNH, GENEBANK™ Accession No. BTCLAB, SEQ ID NO: 160;

[0205] (76) NTNH, GENEBANK™ Accession No. AAD09563, SEQ ID NO: 161;

[0206] (77) NTNH, GENEBANK™ Accession No. CAA73972, SEQ ID NO: 162;

[0207] (78) NTNH, GENEBANK™ Accession No. CAA77991, SEQ ID NO: 163;

[0208] (79) NTNH, GENEBANK™ Accession No. AAB24244, SEQ ID NO: 164;

[0209] (80) NTNH, GENEBANK™ Accession No. BAA90661, SEQ ID NO: 165;

[0210] (81) NTNH, GENEBANK™ Accession No. S70582, SEQ ID NO: 166; and

[0211] (82) NTNH, GENEBANK™ Accession No. BAA75084, SEQ ID NO: 167;

[0212] and

[0213] (83) NTNH, GENEBANK™ Accession No. P19321, SEQ ID NO: 168.

[0214] (84) NTNH, GENEBANK™ Accession No. S48110, SEQ ID NO: 173;

[0215] (85) NTNH, GENEBANK™ Accession No. S48109, SEQ ID NO: 174;

[0216] (86) NTNH, GENEBANK™ Accession No. CAA50145, SEQ ID NO: 175;

[0217] (87) NTNH, GENEBANK™ Accession No. CAA50150, SEQ ID NO: 176;

[0218] (88) NTNH, GENEBANK™ Accession No. AAA23282, SEQ ID NO: 177;

[0219] (89) NTNH, GENEBANK™ Accession No. AAG01403, SEQ ID NO: 178;

[0220] (90) NTNH, GENEBANK™ Accession No. AAA80610, SEQ ID NO: 179;

[0221] (91) NTNH, GENEBANK™ Accession No. 1DIWA, SEQ ID NO: 180;

[0222] (92) NTNH, GENEBANK™ Accession No. 1FV2A, SEQ ID NO: 181;

[0223] (93) NTNH, GENEBANK™ Accession No. 1D0HA, SEQ ID NO: 182;

[0224] (94) NTNH, GENEBANK™ Accession No. 1DLLA, SEQ ID NO: 183;

[0225] (95) NTNH, GENEBANK™ Accession No. 1AF9, SEQ ID NO: 184;

[0226] (96) NTNH, GENEBANK™ Accession No. 1DFQA, SEQ ID NO: 185;

[0227] (97) NTNH, GENEBANK™ Accession No. AAF73267, SEQ ID NO: 186;

[0228] (98) NTNH, GENEBANK™ Accession No. AAA230209, SEQ ID NO: 187;

[0229] and

[0230] (99) NTNH, GENEBANK™ Accession No. CAB43706. SEQ ID NO: 188.

### DETAILED DESCRIPTION OF THE INVENTION

[0231] Translocation of BoNTs (the holotoxin) across epithelial membranes is believed to occur by binding of the BoNT to the membrane of an epithelial cell, invagination of the cell's membrane resulting in enclosure of the BoNT within a vesicle of the cell, translocation of the vesicle from one side of the cell to the other (e.g., from the apical face of the cell to its basolateral face, or vice versa), re-integration of the vesicle with the cell's membrane and release of the BoNT from the cell. It has been discovered that some carboxyterminal fragments of HCs share with naturally-occurring BoNTs the ability to translocate (i.e., transcytose) across epithelial membranes without entering the cytosol of epithelial cells. In particular, the inventors have discovered that HC carboxyterminal fragments as small as about 2 kilodaltons retain epithelial transcytotic capacity and can be used to ferry entities as large as 1000 daltons or greater across epithelial membranes.

[0232] The nature of the entity linked to the carboxyterminal HC fragment does not significantly affect the fragment's transcytotic capacity. Substantially any type of entity can be transported in this manner, limited only by the size capacity of the epithelial vesicles and by one's ability to link the entity to the HC fragment.

[0233] The invention includes a composition for translocating an entity across an animal's non-keratinized epithelium. The composition comprises an entity linked to a carboxyterminal HC fragment. It is preferred that the size of the entity is not greater than the lumenal capacity of vesicles of cells of the epithelium. The epithelium should be a non-keratinized epithelium, and is preferably not kidney epithelium. The fragment-linked entity(ies) can be suspended or mixed with a variety of other ingredients, such as pharmaceutically acceptable vehicles, the protective auxiliary proteins HA and/or NTNH which ordinarily accompany the active botulinum neurotoxin, fillers and/or other components commonly used in pharmaceutical preparations.

[0234] As used herein, the terms “carboxyterminal fragment of the HC of Clostridium botulinum neurotoxin” or “carboxyterminal HC fragment” means a fragment of the amino acid sequence of a full length HC of BoNT of any serotype (e.g., the heavy chain of SEQ ID NOs: 1-7), the fragment including at least a portion of the sequence that makes up that half of the full length HC amino acid sequence that includes that carboxy terminus. Accordingly, it is contemplated that the carboxyterminal fragment for use in the invention is shorter than the full length HC. The fragment may exclude, for example, at least one amino acid residue of the full length HC, and preferably excludes 50, 100, 150, 200, 250, 300, 350, or 400 or more residues of the full length HC. Preferably, many of the excluded residues are those that occur in that half of the full length sequence that includes the amino terminus of the full length HC. Nonetheless, embodiments of the fragment are contemplated in which 5, 10, 15, 25, 50, or more amino acid residues are also omitted from that half of the full length HC that include the carboxy terminus.

[0235] In an embodiment of the invention, the carboxyterminal HC fragment of the invention includes about sixty residues of the HC of the Clostridium botulinum neurotoxin, with a preferred fragment including about thirty-five residues HC of the Clostridium botulinum neurotoxin and a more preferred fragment including twenty to about fifty amino acid residues of the HC of the Clostridium botulinum neurotoxin.

[0236] Alternatively, it may be preferred that the carboxyterminal HC fragment is a polypeptide that has an amino acid sequence that is at least 2% (by molecular mass) of the amino acid sequence of the full length HC of BoNT, with the fragment being obtained by excising/omitting the undesired portion of the full length HC beginning at the amino terminus (i.e., beginning at residue 468 in serotype A of FIG. 1). More preferably, the carboxyterminal HC fragment is a polypeptide that has the amino acid sequence of a portion that comprises at least about 5%, at least about 30%, at least about 50%, at least about 60%, at least about 70%, at least about 80%, and at least about 90% (by molecular mass) of the amino acid sequence of the full length HC of BoNT.

[0237] For example, the carboxyterminal HC fragments, serotype A, herein designated “88 kHC” (eighty-eight kilodalton carboxy fragment of BoNT HC), “66 kHC” (sixty-six kilodalton carboxy fragment of BoNT HC), and “50 kHC” (fifty kilodalton carboxy fragment of BoNT HC) are carboxyterminal HC fragments that are polypeptides that have an amino acid sequence of at least about 80%, at least about 70%, and at least about 50% of a portion of the full length BoNT HC sequence, respectively.

[0238] The carboxyterminal HC fragment for use in the invention can be derived from the HC of any of the known BoNT serotypes (e.g., any of A, B, C, D, E, F, and G) or from any subsequently discovered BoNT serotype. Preferably, the carboxyterminal HC fragment will be derived from a serotype that is known to be pathogenic in animals of the same species as the animal to which the composition is to be administered (e.g., serotypes A, B, and E for humans). However, it is not necessary that the selected fragment be obtained from a serotype that ordinarily exhibits pathogenicity in a given animal in order to retain transcytotic capacity in that animal.

[0239] The suitability for use in the invention of a carboxyterminal fragment HC obtained from a specific serotype or of a fragment having a specific amino acid sequence can be empirically assessed using routine scientific protocols, for example using a model system in which the fragment is contacted with cells of the same type and species to which administration is contemplated and transepithelial transport is observed and evaluated.

[0240] It is recognized that not all fragments will exhibit maximally efficient transcytosis in every epithelial cell type in every species. For example, the experiments described in the examples of this disclosure demonstrate that BoNTs, HCs, and/or fragments of serotypes A and B, do not appear to cross canine kidney epithelial membranes of a certain cell type (MDCK) with high efficiency. The fact that there may be specific embodiments of the invention that are not characterized by highly significant transcytotic abilities across certain epithelial cell types in certain species does not detract from the efficacy of the compositions and methods described herein.

[0241] It is preferred that the carboxyterminal HC fragment used in the methods and compositions of this invention possess at least the portion of the HC that is responsible for the toxin's ability to bind cell membranes. For example, the fragment may comprise the β-trefoil domain and/or the associated lectin binding domain. Alternatively, the carboxyterminal HC fragment may comprise a peptidomimetic of the HC that possesses the same binding properties as the native HC, as empirically determined by routine binding assays.

[0242] The identity or nature of the entity that is linked to the carboxyterminal HC fragment may be any entity that one desires to translocate across an epithelial surface. The entity or entities that is/are linked to the carboxyterminal HC fragment may be of virtually any size, as long as the size of the entity is not greater than the luminal capacity of vesicles of the cells to which the composition is to be administered. It is preferred that the selected entity or entities that is/are linked to the BoNT HC fragment has a molecular mass of about a few hundred daltons (about 100 daltons to about 200 daltons) to about a few tens of thousands of daltons (about 10,000 daltons to about 40,000 daltons). More preferred are entities that have molecular mass that is no greater than about 1000 daltons, and most preferred are entities of molecular mass of about 300 daltons to about 550 daltons. Alternatively, the molecular mass of the entity may be hundreds of thousands, millions, or tens of millions of daltons or more. Thus, transepithelial transport of very large supra-molecular complexes (e.g., a liposome or a virus vector) is contemplated.

[0243] Suitable entities that can be linked to the carboxyterminal HC fragments of the invention may include particles of organic or inorganic materials (for example, ceramic particles), small organic or inorganic chemical compounds (tetrafluroethylene polymers, chitosans), polypeptides (including, for example, single- and multi-subunit proteins such as enzymes, antibodies, and polypeptide epitopes of a pathogen), nucleic acids, and nucleic acid vectors (e.g., virus vectors containing an expressible nucleic acid).

[0244] In an embodiment, the entity comprises an immunogenic epitope of a pathogen of the animal. The composition having the immunogenic epitope linked to a carboxyterminal HC fragment facilitates delivery of the epitope to the bloodstream of the animal, thereby inducing generation of an immune response against the epitope. The immunogenic epitope may be protein or non-protein. The immune response provoked can thereafter inhibit or prevent pathology caused by the pathogen in the animal. Non-protein antigens from which suitable epitopes may be obtained include carbohydrates and nucleic acids.

[0245] Thus, in an embodiment, the compositions described herein are useful as vaccines for inducing protective immunity in vertebrates, such as mammals, reptiles or fish, when the entity to which the carboxyterminal HC fragment is linked is immunogenic. The compositions and methods described herein can be used for vaccination against substantially any human or other vertebrate pathogen (viral, bacterial, prion), including pathogens that may be weaponized and used as agents of biological warfare, as are known or to be developed in the art.

[0246] For example, the pathogen against which the vaccine compositions of the invention may be formulated can be Plasmodium falciparum (the causative agent of malaria), Bordetella pertussis (the causative agent of whooping cough), measles viruses, mumps viruses, rubella viruses, influenza viruses, hepatitis viruses, Pneumococcal viruses, varicella viruses, rabies viruses, and the human immunodeficiency virus. Additionally, the immunogenic epitope for use as an entity can be selected to provoke an immune response against, for example, the pathogens Bacillus anthracis (causative agent of anthrax), Pseudomonas pseudomallei, Clostridium botulinum toxin (causative agent of botulism), Yersinia pestis (causative agent of the plague), Vibriocholera, Variola major (causative agent of smallpox), Francisella tularensis (causative agent of tularemia), virus(es) that are the causative agents of viral hemorrhagic fevers (e.g., Crimean-Cong hemorragic fever virus), Corynebacterium diptheriae, Coxiella burnetti (causative agent of Q fever), organisms of the genus Brucella (e.g., Brucella abortus, Brucella suis, Brucella melitensis, Brucella canis) (causative agent(s) of brucellosis), saxitoxin, Burkholderia mallei (causative agent of glanders), the ricin toxin of Ricinus communis, the epsilon toxin of Clostridium perfringens, Clostridiom tetani, Staphylococcus enterotoxin B, Nipah virus, Hantavirus, Rift Valley fever virus, virus(es) that are the causative agents of tick-borne encephalitis, Staphylococcal enterotoxin B, trichothecene mycotoxins, the causative agent of Yellow fever, the causative agents of multi-drug resistant tuberculosis, and the coronavirus that is the causative agent of Severe Acute Respiratory Syndrome (SARS). The immunogenic epitope that is the entity may also be an epitope that provokes immunity against insect or reptile venom and against various parasites.

[0247] The entity or entities may comprise a molecule that is able to bind specifically with another molecule in the bloodstream of the animal to which the composition is to be administered. Such entities include, but are not limited to, antibody substances such as tetra-subunit immunoglobulins and single-chain antibodies and individual members or fragments of receptor-ligand binding pairs (e.g., tumor necrosis factor alpha and its cell-surface receptor). An “antibody substance” means an immunoglobulin molecule or an immunologically active portion of an immunoglobulin molecule, i.e., a molecule that contains an antigen binding site which specifically binds an antigen. A molecule that specifically binds with an antigen is a molecule that binds the antigen but does not substantially bind other molecules. Examples of immunologically active portions of immunoglobulin molecules include the F(ab) and the F(ab′)₂ fragments which can be generated by treating the antibody with an enzyme such as papain or pepsin, respectively. The term also includes polyclonal and monoclonal antibodies. The term “monoclonal antibody” or “monoclonal antibody composition” refers to a population of antibody molecules that contain only one species of an antigen binding site capable of immunoreacting with a particular epitope.

[0248] In yet another important embodiment, the entity is an agent that exhibits a catalytic or biological activity in vivo. Examples of such agents include cytotoxins, such as ricin; enzymes, such as proteases (e.g., tissue-type plasminogen activators or urokinase-type plasminogen activators); and enzyme inhibitors. The entity can also be a detectable label, such as a contrast agent, a radio-labeled antibody substance, or a radioisotope, such as ³H, ³⁵S, ¹²³I, and/or ¹³¹I.

[0249] It may be desirable that the linked entity is a larger entity that encompasses or incorporates numerous smaller therapeutic or immunogenic agents. For example, entities which may be used to transport numerous smaller therapeutic, diagnostic or immunogenic agents include liposomes, resealed RBCs, micelles, microspheres, and microparticles.

[0250] In the composition of the invention, the selected entity (or entities) is linked to the selected carboxyterminal HC fragment. A single fragment can be linked to one or more entities that are the same or are different. Alternatively, a single entity can be linked with multiple fragments (each of which may be the same or different).

[0251] The entity may be linked to the carboxyterminal HC fragment at any location, as long as the transcytotic capability of the fragment is not significantly impaired. For example, the entity may be linked to or near carboxy terminus of the fragment. It is preferred that the entity is linked at or near the amino terminus end of the fragment.

[0252] The nature of the linker may vary. The precise chemistry, linker, or method used to link the entity and the BoNT HC fragment is not critical. The linkage must merely be sufficiently strong or resilient that the fragment does not dissociate from the entity upon vesicular encapsulation of the fragment by the epithelial cell. The entity and the fragment may be linked by a covalent bond, such as, for example, a peptide bond. However, strong non-covalent linkage can also be used.

[0253] The linker may also be an intervening molecule, which may or may not have a chemical, therapeutic, or diagnostic function as well as its linking function. Examples of intervening molecules that can be used as linkers include biotin, avidin, or an antibody substance. Linkers of this type may be interposed between the entity and the fragment.

[0254] In the case where the selected entity or entities is a peptide or polypeptide, the entity can be linked to the selected fragment by peptide bond(s), thereby forming a unitary polypeptide comprising the entity and the fragment. For example, a unitary polypeptide can be prepared that comprises both the carboxterminal HC fragment and the selected entity. Such polypeptides can be prepared in any manner known or to be developed in the art, such as by expression of a fusion polypeptide from a recombinant expression vector, or by chemical synthesis, such as, for example, the solid-phase method.

[0255] The entity may also be linked by incorporation of the fragment into the entity itself. For example, if the entity is a liposome, the fragment may include a specific domain that permits a portion of the fragment to penetrate and be maintained within the structure of the liposome, while the transcytotic portion of the fragment remains unimpaired.

[0256] Depending on the desired use/route of administration intended for the final composition, methods can also be used to link the entity and the fragment in a chemically or biologically unstable or reversible manner. For example, the linkage may be enzyme cleavable by an enzyme co-administered to the patient or that is known to be present in the anatomical area to which the composition is delivered. Alternatively, one or more disulfide bonds may be used.

[0257] The entity and the fragment can be made separately and thereafter linked, or they can be made simultaneously.

[0258] In an embodiment, the composition of the invention may be a vaccine against the Clostridium botulinum toxin, in which the entity and the carboxyterminal HC fragment exist as an integral polypeptide molecule, and the linker is therefore a peptide bond. In this embodiment of the invention, the carboxyterminal HC fragment/entity integral polypeptide molecule comprises at least that portion of the sequence of the full length BoNT that encodes an immunogenic epitope that provokes an immune response in the animal for which the vaccine is intended.

[0259] Regardless of the epitope or the specific type of entity utilized, the immune response elicited may be a systemic immune response or a mucosal immune response. Depending on the circumstances in which the compositions and methods of the invention are to be applied, it may be desirable to elicit a mucosal immune response, rather than a systemic response, especially when the antigen against which immunity can be produced can be utilized in both a beneficial and a detrimental/toxic manner.

[0260] As an example, it is known that botulinum toxin is a potent toxin that is used as an agent of warfare or bioterrorism. Thus, immunization using the compositions and methods of the invention against botulinum toxin may be desirable. However, botulinum toxin is commonly used as a therapeutic agent to treat disorders that are characterized by an excessive and involuntary release of acetylcholine. Thus, an individual having a systemic immunity to botulinum toxin would be subsequently substantially foreclosed from receiving the benefits of botulinum toxin therapy.

[0261] Compositions of the invention that are vaccines that evoke substantially only mucosal immunity, thereby avoiding this problem, may be prepared by use of a composition that contains the vaccine of the invention and an adjuvant that selectively triggers substantially only mucosal immunity. Such adjuvants include, for example, cholera toxin B subunit or unmethylated oligonucleotides. The adjuvants can be associated with or linked to the fragment-linked antigen or the fragment itself, or the adjuvant(s) can be co-administered to the animal.

[0262] In another embodiment, the vaccine of the invention can be prepared so as to elicit substantially only mucosal immunity in the animal to which it is administered by including signaling molecules that promote mucosal immune response and/or inhibit systemic immune response in the composition of the invention. Such signaling molecules may include interleukins or transforming growth factors. The signaling molecules may be linked or otherwise associated with the fragment-linked antigen, the fragment itself, or may be co-administered to the animal with the compositions of the invention.

[0263] By use of the compositions and methods described herein, transepithelial transport of the composition of the invention can be accomplished, in most cases, unidirectionally—i.e., from the apical surface of the epithelium to the basolateral surface, or, alternatively from the basolateral surface to the apical surface. The selected epithelium may be any known, although the efficiency of transcytosis may vary depending on the species of vertebrate, the specific epithelium selected, and/or other chemical or physiological factors. For example, it has been demonstrated that, in certain canine kidney epithelial cell cultures, transport using carboxyterminal fragments of HC, serotypes A and B, is less efficient; thus, kidney epithelium is not preferred.

[0264] The epithelium to be crossed by the entity-linked carboxyterminal HC fragment is preferably non-keratinized, or has been rendered non-keratinized. Most epithelia other than skin are normally non-keratinized. However, de-keratinization or partial solubilization of skin tissue can enable transdermal use of the compositions and methods described herein. Examples of generally suitable epithelia include gastrointestinal (e.g., oral, esophageal, gastric, ileal, duodenal, jejunal, colon, and anal), nasal, pulmonary, vaginal, and ocular epithelia. Epithelia accessed by peritoneal administration of the compositions described herein can also be suitable.

[0265] A wide variety of animals are susceptible to infection or colonization by Clostridium botulinum. It is preferred that the compositions and methods of the invention are applied to these animals. Accordingly, the compositions described herein are preferably for use in substantially all vertebrates, and to induce physiological responses in non-vertebrate animals, such as insects.

[0266] One species of animals for which the compositions and methods described herein are intended is humans. For humans, use of carboxyterminal HC fragments derived from full length HCs of the A, B, and E serotypes are preferred. Additionally, many fragments from all the BoNT serotypes will be useful in common animals, such as house pets and farm animals. Thus, veterinary uses analogous to the pharmaceutical uses described herein are contemplated.

[0267] As will be recognized by a person of skill, the ability of a fragment to transcytose across an epithelium of a specific animal will vary depending on various factors, including the primary sequence of the fragment, the type/nature of the entity linked thereto, the serotype of BoNT from which the fragment was derived, etc. For example, fragments derived from serotype C may not comprise a most efficient transepithelial delivery in humans, but can be used to facilitate relatively effective and efficient delivery in non-human animals.

[0268] This differential capability among species facilitates use of the compositions of the invention for pesticidal and insecticidal purposes (i.e., by linking a fragment that does not transcytose across human epithelia with an entity that is a toxic agent). Suitable pesticidal or insecticidal agents may be those that exhibit greater toxicity toward pests or vermin than they do toward humans, and can be used to make pesticidal or insecticidal agents safer than many of those presently available. Such agents can be particularly useful in environments in which unavoidable exposure to humans is anticipated (e.g., in environments including children or food preparation facilities).

[0269] The invention also includes a foodstuff, wherein the genome of an ingredient of the foodstuff has been engineered to include a polynucleotide expressibly encoding a chimeric protein comprising an immunogenic or a therapeutic polypeptide linked to a carboxyterminal HC fragment. If desired, the chimeric protein may also be engineered to include one or more of the auxiliary proteins (HA(s) or NTNHs; SEQ ID NOs: 20 to 168, and 170 to 188), or other proteins or polypeptides.

[0270] Examples of ingredients which may be genetically modified accordingly include banana, potatoes, spinach, soybeans, and tomatoes. The ingredient can be administered individually to a human (e.g., by ingestion of an uncooked recombinant banana, tomato, or potato), or the ingredient can be incorporated into a prepared food comprising the ingredient (e.g., a fruit salad comprising pieces of recombinant banana).

[0271] The invention encompasses the preparation and use of medicaments and pharmaceutical or veterinary compositions comprising a carboxyterminal HC fragment having an entity linked thereto as an active ingredient. Such a pharmaceutical composition may consist of the linked active ingredient alone, in a form suitable for administration to a subject, or the pharmaceutical composition may comprise the linked active ingredient and one or more pharmaceutically acceptable vehicles, one or more additional ingredients, or some combination of these. Administration of one of these pharmaceutical compositions to a subject is useful for treating, ameliorating, relieving, inducing an immune response against, preventing, inhibiting, or reducing any of a variety of disorders in the subject, as described elsewhere in the present disclosure. The active ingredient may be present in the pharmaceutical composition in the form of a physiologically acceptable ester or salt, such as in combination with a physiologically acceptable cation or anion, as is well known in the art.

[0272] As used herein, the term “pharmaceutically acceptable vehicle” means a chemical composition with which the active ingredient may be combined and which, following the combination, can be used to administer the active ingredient to a subject.

[0273] As used herein, the term “physiologically acceptable” ester or salt means an ester or salt form of the active ingredient which is compatible with any other ingredients of the pharmaceutical composition and which is not deleterious to the subject to which the composition is to be administered.

[0274] The formulations of the pharmaceutical compositions described herein may be prepared by any method known or hereafter developed in the art of pharmacology. In general, such preparatory methods include the step of bringing the active ingredient into association with a vehicle or one or more other accessory ingredients, and then, if necessary or desirable, shaping or packaging the product into a desired single- or multi-dose unit.

[0275] Although the descriptions of pharmaceutical compositions provided are principally directed to pharmaceutical compositions which are suitable for ethical administration to humans, it will be understood by the skilled artisan that such compositions are generally suitable for administration to animals of all sorts. Modification of pharmaceutical compositions suitable for administration to humans in order to render the compositions suitable for administration to various animals is well understood, and the ordinarily skilled veterinary pharmacologist can design and perform such modification with merely ordinary, if any, experimentation. Subjects to which administration of the pharmaceutical compositions of the invention is contemplated include, but are not limited to, humans and other primates, mammals, including commercially relevant mammals; such as cattle, pigs, horses, sheep, cats, and dogs; birds, including commercially relevant birds such as chickens, ducks, quail, geese, and turkeys; fish including farm-raised fish and aquarium fish; and crustaceans such as farm-raised shellfish and mollusks.

[0276] Pharmaceutical compositions that are useful in the methods of the invention may be prepared, packaged, or sold in formulations suitable for gastrointestinal, oral, rectal, vaginal, parenteral, topical, pulmonary, intranasal, buccal, ophthalmic, or another route of administration. Other contemplated formulations include projected nanoparticles, liposomal preparations, resealed erythrocytes containing the active ingredient, and immunologically-based formulations.

[0277] A pharmaceutical composition of the invention may be prepared, packaged, or sold in bulk, as a single unit dose, or as a plurality of single unit doses. As used herein, a “unit dose” is discrete amount of the pharmaceutical composition comprising a predetermined amount of the active ingredient. The amount of the active ingredient is generally equal to the dosage of the active ingredient which would be administered to a subject or a convenient fraction of such a dosage such as, for example, one-half or one-third of such a dosage.

[0278] The relative amounts of the active ingredient, the pharmaceutically acceptable vehicle, and any additional ingredients in a pharmaceutical composition of the invention will vary, depending upon the identity, size, and condition of the subject treated and further depending upon the route by which the composition is to be administered. By way of example, the composition may comprise between 0.1% and 100% (w/w) active ingredient. A unit dose of a pharmaceutical composition of the invention will generally comprise from about 1 microgram to about 1 gram of the active ingredient, and preferably comprises from about 100 micrograms to about 100 milligrams of the active ingredient.

[0279] In addition to the active ingredient, a pharmaceutical composition of the invention may further comprise one or more additional pharmaceutical agents. Particularly contemplated additional agents include ingredients which can shield the BoNT HC fragment-entity complex from the effects of the acidic pH environment of portions of the gastrointestinal tract. Substantially all formulations and devices for effecting enteric delivery known or to be developed can be used. Further, as discussed above, the pharmaceutical composition may contain the one or more of the auxiliary proteins (e.g., SEQ ID NOs: SEQ ID NOs: 20 to 168, and 170 to 188) associated in nature with the BoNT toxin (HA(s) and NTNHs), especially if the composition is to be administered orally or via any portion of the gastrointestinal tract. Although it is known in the art that varying proteins are associated with varying serotypes of BoNT, it is not necessary that this correspondence is maintained in the practice of the invention.

[0280] Controlled- or sustained-release formulations of a pharmaceutical composition of the invention may be made using conventional technology.

[0281] A formulation of a pharmaceutical composition of the invention suitable for oral administration may be prepared, packaged, or sold in the form of a discrete solid dose unit including, but not limited to, a tablet, a hard or soft capsule, a cachet, a troche, or a lozenge, each containing a predetermined amount of the active ingredient. Other formulations suitable for oral administration include, but are not limited to, a powdered or granular formulation, an aqueous or oily suspension, an aqueous or oily solution, or an emulsion.

[0282] As used herein, an “oily” liquid is one which comprises a carbon-containing liquid molecule and which exhibits a less polar character than water.

[0283] A tablet comprising the active ingredient may, for example, be made by compressing or molding the active ingredient, optionally with one or more additional ingredients. Compressed tablets may be prepared by compressing, in a suitable device, the active ingredient in a free-flowing form such as a powder or granular preparation, optionally mixed with one or more of a binder, a lubricant, an excipient, a surface active agent, and a dispersing agent. Molded tablets may be made by molding, in a suitable device, a mixture of the active ingredient, a pharmaceutically acceptable vehicle, and at least sufficient liquid to moisten the mixture. Pharmaceutically acceptable excipients used in the manufacture of tablets include, but are not limited to, inert diluents, granulating and disintegrating agents, binding agents, and lubricating agents. Suitable dispersing agents include, but are not limited to, potato starch and sodium starch glycolate. Known surface active agents include, but are not limited to, sodium lauryl sulfate. Known diluents include, but are not limited to, calcium carbonate, sodium carbonate, lactose, microcrystalline cellulose, calcium phosphate, calcium hydrogen phosphate, and sodium phosphate. Suitable granulating and disintegrating agents include, but are not limited to, corn starch and alginic acid. Binding agents include, but are not limited to, gelatin, acacia, pre-gelatinized maize starch, polyvinylpyrrolidone, and hydroxypropyl methylcellulose. Lubricating agents include, but are not limited to, magnesium stearate, stearic acid, silica, and talc.

[0284] Tablets may be non-coated or they may be coated using known or to be developed methods to achieve delayed disintegration in the gastrointestinal tract of a subject, thereby providing sustained release and absorption of the active ingredient. By way of example, a material such as glyceryl monostearate or glyceryl distearate may be used to coat tablets. Further by way of example, tablets may be coated using methods described in U.S. Pat. Nos. 4,256,108; 4,160,452; and 4,265,874 to form osmotically-controlled release tablets. Tablets may further comprise a sweetening agent, a flavoring agent, a coloring agent, a preservative, or some combination of these in order to provide pharmaceutically elegant and palatable preparation.

[0285] Hard capsules comprising the active ingredient may be made using a physiologically degradable composition, such as gelatin. Such hard capsules comprise the active ingredient, and may further comprise additional ingredients including, for example, an inert solid diluent such as calcium carbonate, calcium phosphate, or kaolin.

[0286] Soft gelatin capsules comprising the active ingredient may be made using a physiologically degradable composition, such as gelatin. Such soft capsules comprise the active ingredient, which may be mixed with water or an oil medium such as peanut oil, liquid paraffin, or olive oil.

[0287] Oral compositions may be made, using known technology, which specifically release orally-administered agents in the small or large intestines of a human patient. For example, formulations for delivery to the gastrointestinal system, including the colon, include enteric coated systems, based, e.g., on methacrylate copolymers such as poly(methacrylic acid, methyl methacrylate), which are only soluble at pH 6 and above, so that the polymer only begins to dissolve on entry into the small intestine. The site where such polymer formulations disintegrate is dependent on the rate of intestinal transit and the amount of polymer present. For example, a relatively thick polymer coating is used for delivery to the proximal colon (Hardy et al., 1987 Aliment. Pharmacol. Therap. 1:273-280). Polymers capable of providing site-specific colonic delivery can also be used, wherein the polymer relies on the bacterial flora of the large bowel to provide enzymatic degradation of the polymer coat and hence release of the drug. For example, azopolymers (U.S. Pat. No. 4,663,308), glycosides (Friend et al., 1984, J. Med. Chem. 27:261-268) and a variety of naturally available and modified polysaccharides (PCT GB89/00581) may be used in such formulations.

[0288] Pulsed release technology such as that described in U.S. Pat. No. 4,777,049 may also be used to administer the active agent to a specific location within the gastrointestinal tract. Such systems permit drug delivery at a predetermined time and can be used to deliver the active agent, optionally together with other additives that my alter the local microenvironment to promote agent stability and uptake, directly to the colon, without relying on external conditions other than the presence of water to provide in vivo release.

[0289] Liquid formulations of a pharmaceutical composition of the invention which are suitable for oral administration may be prepared, packaged, and sold either in liquid form or in the form of a dry product intended for reconstitution with water or another suitable vehicle prior to use.

[0290] Liquid suspensions may be prepared using conventional methods to achieve suspension of the active ingredient in an aqueous or oily vehicle. Aqueous vehicles include, for example, water and isotonic saline. Oily vehicles include, for example, almond oil, oily esters, ethyl alcohol, vegetable oils such as arachis, olive, sesame, or coconut oil, fractionated vegetable oils, and mineral oils such as liquid paraffin. Liquid suspensions may further comprise one or more additional ingredients including, but not limited to, suspending agents, dispersing or wetting agents, emulsifying agents, demulcents, preservatives, buffers, salts, flavorings, coloring agents, and sweetening agents. Oily suspensions may further comprise a thickening agent. Suspending agents include, but are not limited to, sorbitol syrup, hydrogenated edible fats, sodium alginate, polyvinylpyrrolidone, gum tragacanth, gum acacia, and cellulose derivatives such as sodium carboxymethylcellulose, methylcellulose, and hydroxypropylmethylcellulose. Dispersing or wetting agents include, but are not limited to, naturally-occurring phosphatides such as lecithin, condensation products of an alkylene oxide with a fatty acid, with a long chain aliphatic alcohol, with a partial ester derived from a fatty acid and a hexitol, or with a partial ester derived from a fatty acid and a hexitol anhydride (e.g. polyoxyethylene stearate, heptadecaethyleneoxycetanol, polyoxyethylene sorbitol monooleate, and polyoxyethylene sorbitan monooleate, respectively). Emulsifying agents include, but are not limited to, lecithin and acacia. Preservatives include, but are not limited to, methyl, ethyl, or n-propyl-para-hydroxybenzoates, ascorbic acid, and sorbic acid. Sweetening agents include, for example, glycerol, propylene glycol, sorbitol, sucrose, and saccharin. Thickening agents for oily suspensions include, for example, beeswax, hard paraffin, and cetyl alcohol.

[0291] Liquid solutions of the active ingredient in aqueous or oily solvents may be prepared in substantially the same manner as liquid suspensions, the primary difference being that the active ingredient is dissolved, rather than suspended in the solvent. Liquid solutions of the pharmaceutical composition of the invention may comprise each of the components described with regard to liquid suspensions, it being understood that suspending agents will not necessarily aid dissolution of the active ingredient in the solvent. Aqueous solvents include, for example, water and isotonic saline. Oily solvents include, for example, almond oil, oily esters, ethyl alcohol, vegetable oils such as arachis, olive, sesame, or coconut oil, fractionated vegetable oils, and mineral oils, such as liquid paraffin.

[0292] Powdered and granular formulations of a pharmaceutical preparation of the invention may be prepared using known methods. Such formulations may be administered directly to a subject, used, for example, to form tablets, to fill capsules, or to prepare an aqueous or oily suspension or solution by addition of an aqueous or oily vehicle thereto. Each of these formulations may further comprise one or more of dispersing or wetting agent, a suspending agent, and a preservative. Additional excipients, such as fillers and sweetening, flavoring, or coloring agents, may also be included in these formulations.

[0293] A pharmaceutical composition of the invention may also be prepared, packaged, or sold in the form of oil-in-water emulsion or a water-in-oil emulsion. The oily phase may be a vegetable oil such as olive or arachis oil, a mineral oil such as liquid paraffin, or a combination of these. Such compositions may further comprise one or more emulsifying agents such as naturally occurring gums such as gum acacia or gum tragacanth, naturally-occurring phosphatides such as soybean or lecithin phosphatide, esters or partial esters derived from combinations of fatty acids and hexitol anhydrides such as sorbitan monooleate, and condensation products of such partial esters with ethylene oxide such as polyoxyethylene sorbitan monooleate. These emulsions may also contain additional ingredients including, for example, sweetening or flavoring agents.

[0294] A pharmaceutical composition of the invention may be prepared, packaged, or sold in a formulation suitable for rectal administration. Such a composition may be in the form of, for example, a suppository, a retention enema preparation, and a solution for rectal or colonic irrigation.

[0295] Suppository formulations may be made by combining the active ingredient with a non-irritating pharmaceutically acceptable excipient which is solid at ordinary room temperature (i.e., about 20° C.) and which is liquid at the rectal temperature of the subject (i.e. about 37° C. in a healthy human). Suitable pharmaceutically acceptable excipients include, but are not limited to, cocoa butter, polyethylene glycols, and various glycerides. Suppository formulations may further comprise various additional ingredients including, but not limited to, antioxidants and preservatives.

[0296] Retention enema preparations or solutions for rectal or colonic irrigation may be made by combining the active ingredient with a pharmaceutically acceptable liquid vehicle. As is well known in the art, enema preparations may be administered using, and may be packaged within, a delivery device adapted to the rectal anatomy of the subject. Enema preparations may further comprise various additional ingredients including, but not limited to, antioxidants and preservatives.

[0297] A pharmaceutical composition of the invention may be prepared, packaged, or sold in a formulation suitable for vaginal administration. Such a composition may be in the form of, for example, a suppository, an impregnated or coated vaginally-insertable material such as a tampon, a douche preparation, or a solution for vaginal irrigation.

[0298] Methods for impregnating or coating a material with a chemical composition are known in the art, and include, but are not limited to methods of depositing or binding a chemical composition onto a surface, methods of incorporating a chemical composition into the structure of a material during the synthesis of the material (i.e., such as with a physiologically degradable material), and methods of absorbing an aqueous or oily solution or suspension into an absorbent material, with or without subsequent drying.

[0299] Douche preparations or solutions for vaginal irrigation may be made by combining the active ingredient with a pharmaceutically acceptable liquid vehicle. As is well known in the art, douche preparations may be administered using, and may be packaged within, a delivery device adapted to the vaginal anatomy of the subject. Douche preparations may further comprise various additional ingredients including, but not limited to, antioxidants, antibiotics, antifungal agents, and preservatives.

[0300] As used herein, “parenteral administration” of a pharmaceutical composition includes any route of administration characterized by physical breaching of a tissue of a subject and administration of the pharmaceutical composition through the breach in the tissue. Parenteral administration thus includes, but is not limited to, administration of a pharmaceutical composition by injection of the composition, by application of the composition through a surgical incision, by application of the composition through a tissue-penetrating non-surgical wound, and the like. In particular, parenteral administration is contemplated to include, but is not limited to, subcutaneous, intraperitoneal, intravenous, intra-arterial, intramuscular, or intrasternal injection and intravenous, intra-arterial, or kidney dialytic infusion techniques.

[0301] Formulations of a pharmaceutical composition suitable for parenteral administration comprise the fragment-linked active ingredient combined with a pharmaceutically acceptable vehicle, such as sterile water or sterile isotonic saline. Such formulations may be prepared, packaged, or sold in a form suitable for bolus administration or for continuous administration. Injectable formulations may be prepared, packaged, or sold in unit dosage form, such as in ampoules, in multi-dose containers containing a preservative, or in single-use devices for auto-injection or injection by a medical practitioner. Formulations for parenteral administration include, but are not limited to, suspensions, solutions, emulsions in oily or aqueous vehicles, pastes, and implantable sustained-release or biodegradable formulations. Such formulations may further comprise one or more additional ingredients including, but not limited to, suspending, stabilizing, or dispersing agents. In one embodiment of a formulation for parenteral administration, the active ingredient is provided in dry (i.e., powder or granular) form for reconstitution with a suitable vehicle (e.g., sterile pyrogen-free water) prior to parenteral administration of the reconstituted composition.

[0302] The pharmaceutical compositions may be prepared, packaged, or sold in the form of a sterile injectable aqueous or oily suspension or solution. This suspension or solution may be formulated according to the art, and may comprise, in addition to the active ingredient, additional ingredients such as the dispersing agents, wetting agents, or suspending agents described herein. Such sterile injectable formulations may be prepared using a non-toxic parenterally-acceptable diluent or solvent, such as water or 1,3-butane diol, for example. Other acceptable diluents and solvents include, but are not limited to, Ringer's solution, isotonic sodium chloride solution, and fixed oils such as synthetic mono- or di-glycerides. Other parentally-administrable formulations which are useful include those which comprise the active ingredient in microcrystalline form, in a liposomal preparation, or as a component of a biodegradable polymer systems. Compositions for sustained release or implantation may comprise pharmaceutically acceptable polymeric or hydrophobic materials such as an emulsion, an ion exchange resin, a sparingly soluble polymer, or a sparingly soluble salt.

[0303] Formulations suitable for topical administration include, but are not limited to, liquid or semi-liquid preparations such as liniments, lotions, oil-in-water or water-in-oil emulsions such as creams, ointments or pastes, and solutions or suspensions. Topically-administrable formulations may, for example, comprise from about 1% to about 10% (w/w) active ingredient, although the concentration of the active ingredient may be as high as the solubility limit of the active ingredient in the solvent. Formulations for topical administration may further comprise one or more of the additional ingredients described herein. Topically administered formulations should be adapted for application to a non-keratinized epithelial tissue (e.g., the inside of the mouth, nose, or throat), and can be provided together with an applicator or dispenser for achieving such application.

[0304] A pharmaceutical composition of the invention may be prepared, packaged, or sold in a formulation suitable for pulmonary administration via the buccal cavity. Such a formulation may comprise dry particles which comprise the active ingredient and which have a diameter in the range from about 0.5 to about 7 nanometers, and preferably from about 1 to about 6 nanometers. Such compositions are conveniently in the form of dry powders for administration using a device comprising a dry powder reservoir to which a stream of propellant may be directed to disperse the powder or using a self-propelling solvent/powder-dispensing container such as a device comprising the active ingredient dissolved or suspended in a low-boiling propellant in a sealed container. Preferably, such powders comprise particles wherein at least 98% of the particles by weight have a diameter greater than 0.5 nanometers and at least 95% of the particles by number have a diameter less than 7 nanometers. More preferably, at least 95% of the particles by weight have a diameter greater than 1 nanometer and at least 90% of the particles by number have a diameter less than 6 nanometers. Dry powder compositions preferably include a solid fine powder diluent such as sugar and are conveniently provided in a unit dose form.

[0305] Low boiling propellants generally include liquid propellants having a boiling point of below 65° F. at atmospheric pressure. Generally the propellant may constitute 50 to 99.9% (w/w) of the composition, and the active ingredient may constitute 0.1 to 20% (w/w) of the composition. The propellant may further comprise additional ingredients such as a liquid non-ionic or solid anionic surfactant or a solid diluent (preferably having a particle size of the same order as particles comprising the active ingredient).

[0306] Pharmaceutical compositions of the invention formulated for pulmonary delivery may also provide the active ingredient in the form of droplets of a solution or suspension. Such formulations may be prepared, packaged, or sold as aqueous or dilute alcoholic solutions or suspensions, optionally sterile, comprising the active ingredient, and may conveniently be administered using any nebulization or atomization device. Such formulations may further comprise one or more additional ingredients including, but not limited to, a flavoring agent such as saccharin sodium, a volatile oil, a buffering agent, a surface active agent, or a preservative such as methylhydroxybenzoate. The droplets provided by this route of administration preferably have an average diameter in the range from about 0.1 to about 200 nanometers.

[0307] The formulations described herein as being useful for pulmonary delivery are also useful for intranasal delivery of a pharmaceutical composition of the invention.

[0308] Another formulation suitable for intranasal administration is a coarse powder comprising the active ingredient and having an average particle from about 0.2 to 500 micrometers. Such a formulation is administered in the manner in which snuff is taken i.e., by rapid inhalation through the nasal passage from a container of the powder held close to the nares.

[0309] Formulations suitable for nasal administration may, for example, comprise from about as little as 0.1% (w/w) and as much as 100% (w/w) of the active ingredient, and may further comprise one or more of the additional ingredients described herein.

[0310] A pharmaceutical composition of the invention may be prepared, packaged, or sold in a formulation suitable for buccal administration. Such formulations may, for example, be in the form of tablets or lozenges made using conventional methods, and may, for example, 0.1 to 20% (w/w) active ingredient, the balance comprising an orally dissolvable or degradable composition and, optionally, one or more of the additional ingredients described herein. Alternately, formulations suitable for buccal administration may comprise a powder or an aerosolized or atomized solution or suspension comprising the active ingredient. Such powdered, aerosolized, or aerosolized formulations, when dispersed, preferably have an average particle or droplet size in the range from about 0.1 to about 200 nanometers, and may further comprise one or more of the additional ingredients described herein.

[0311] A pharmaceutical composition of the invention may be prepared, packaged, or sold in a formulation suitable for ophthalmic administration. Such formulations may, for example, be in the form of eye drops including, for example, a 0.1-1.0% (w/w) solution or suspension of the active ingredient in an aqueous or oily liquid vehicle. Such drops may further comprise buffering agents, salts, or one or more other of the additional ingredients described herein. Other ophthalmalmically-administrable formulations which are useful include those which comprise the active ingredient in microcrystalline form or in a liposomal preparation.

[0312] As used herein, “additional ingredients” include, but are not limited to, one or more of the following: excipients; surface active agents; dispersing agents; inert diluents; granulating and disintegrating agents; binding agents; lubricating agents; sweetening agents; flavoring agents; coloring agents; preservatives; physiologically degradable compositions such as gelatin; aqueous vehicles and solvents; oily vehicles and solvents; suspending agents; dispersing or wetting agents; emulsifying agents, demulcents; buffers; salts; thickening agents; fillers; emulsifying agents; antioxidants; antibiotics; antifungal agents; stabilizing agents; and pharmaceutically acceptable polymeric or hydrophobic materials. Other “additional ingredients” which may be included in the pharmaceutical compositions of the invention are known in the art and described, for example in Genaro, ed., 1985, Remington's Pharmaceutical Sciences, Mack Publishing Co., Easton, Pa., U.S.A., which is incorporated herein by reference.

[0313] It is understood that the ordinarily skilled physician or veterinarian will readily determine and prescribe an effective amount of the compound to treat, ameliorate, relieve, inhibit, prevent, reduce a disorder in the subject or to elicit an immune response. In so proceeding, the physician or veterinarian may, for example, prescribe a relatively low dose at first, subsequently increasing the dose until an appropriate response is obtained. It is further understood, however, that the specific dose level for any particular subject will depend upon a variety of factors including the activity of the specific compound employed, the age, body weight, general health, gender, and diet of the subject, the time of administration, the route of administration, the rate of excretion, any drug combination, and the severity of the disorder.

[0314] Another aspect of the invention relates to a kit comprising a pharmaceutical composition of the invention and an instructional material. As used herein, an “instructional material” includes a publication, a recording, a diagram, or any other medium of expression which is used to communicate the usefulness of the pharmaceutical composition of the invention for treating, ameliorating, relieving, inhibiting, preventing, or reducing a disorder in a subject or for administering such a composition via a route described herein. The instructional material may also, for example, describe an appropriate dose of the pharmaceutical composition of the invention. The instructional material of the kit of the invention may, for example, be affixed to a container which contains a pharmaceutical composition of the invention or be shipped together with a container which contains the pharmaceutical composition. Alternatively, the instructional material may be shipped separately from the container with the intention that the instructional material and the pharmaceutical composition be used cooperatively by the recipient.

[0315] The invention also includes a kit comprising a pharmaceutical composition of the invention and a delivery device for delivering the composition to a subject. By way of example, the delivery device may be a squeezable spray bottle, a metered-dose spray bottle, an aerosol spray device, an atomizer, a dry powder delivery device, a self-propelling solvent/powder-dispensing device, a syringe, a needle, a tampon, or a dosage measuring container. The kit may further comprise an instructional material as described herein.

[0316] The invention is now described with reference to the following Examples. These Examples are provided for the purpose of illustration only. The invention is not limited to these Examples, but rather encompasses all variations which are evident as a result of the teaching provided herein.

### EXAMPLES

[0317] The results of experiments detailed in the Examples are summarized in Table 1.

TABLE 1

| Example | | | Cell | Transport | Transport | Transport Rate |
|---|---|---|---|---|---|---|
| No. | Molecule^{A} | Serotype | Type^{B} | A-->B^{C} | B-->A^{C} | (fmol/hr/cm²)^{D} |
| 1 | BoNT | A | T-84 | + | | FIG. 3 |
| 2 | BoNT | A | MDCK | − | | FIG. 4 |
| 3 | ¹²⁵I-BoNT | A | T-84 | + | | 11.29 ± 0.30 |
| 4 | ¹²⁵I-BoNT | A | T-84 | | + | 8.98 ± 0.20 |
| 5 | ¹²⁵I-BoNT | A | Caco-2 | + | | 8.42 ± 0.49 |
| 6 | ¹²⁵I-BoNT | A | MDCK | + | | 0.05 ± 0.01 |
| 7 | ¹²⁵I-uBoNT | B | T-84 | + | | 9.01 ± 0.44 |
| 8 | ¹²⁵I-uBoNT | B | MDCK | − | | 0.05 ± 0.00 |
| 9 | ¹²⁵I-uBoNT | B | T-84 | | + | 4.48 ± 0.00 |
| 10 | ¹²⁵I-uBoNT | B | MDCK | | − | 0.05 ± 0.00 |
| 11 | ¹²⁵I-nBoNT | B | T-84 | + | | 6.57 ± 0.07 |
| 12 | ¹²⁵I-nBoNT | B | MDCK | − | | 0.05 ± 0.00 |
| 13 | ¹²⁵I-nBoNT | B | T-84 | | + | 5.54 ± 0.00 |
| 14 | ¹²⁵I-nBoNT | B | MDCK | | − | 0.05 ± 0.00 |
| 15 | HC | A | T-84 | + | | FIG. 5 |
| 16 | HC | A | MDCK | − | | FIG. 6 |
| 17 | ¹²⁵I-HC | A | T-84 | + | | 7.10 ± 0.00 |
| 18 | ¹²⁵I-HC | A | MDCK | − | | 0.06 ± 0.00 |
| 19 | 66 Khc | A | T-84 | + | | FIG. 7 |
| 20 | 66 kHC | A | MDCK | − | | FIG. 8 |
| 21 | 50 kHC | A | T-84 | + | | FIG. 9 |
| 22 | 50 kHC | A | MDCK | − | | |
| 23 | ¹²⁵I-50 kHC | A | T-84 | + | | 13.97 ± 0.00 |
| 24 | ¹²⁵I-50 kHC | A | MDCK | − | | 0.06 ± 0.00 |
| 25 | AF-BoNT | A | T-84 | + | | |
| 26 | AF-BoNT | A | MDCK | − | | |
| 27 | bt-50 kHC | A | T-84 | + | | |
| 28 | bt-50 kHC | A | MDCK | − | | |
| 29 | GFP-66 kHC | A | T-84 | + | | |
| 30 | GFP-66 kHC | A | MDCK | − | | |
| 31 | Stag-50 kHC | A | T-84 | + | | |
| 32 | Stag-50 kHC | A | MDCK | − | | |
| 33 | GST-88 kHC | A | T-84 | + | | |
| 34 | GST-88 kHC | A | MDCK | − | | |
| 35 | GST-66 kHC | A | T-84 | + | | |
| 36 | GST-66 kHC | A | MDCK | − | | |
| 37 | ¹²⁵I-BoNT | A | Calu-3 | + | | 0.422 ± 0.076 |
| 38 | ¹²⁵I-BoNT | A | Calu-3 | | + | 0.206 ± 0.037 |
| 39 | ¹²⁵I-HC | A | Calu-3 | + | | 0.198 ± 0.007 |
| 40 | ¹²⁵I-HC | A | Calu-3 | | + | 0.112 ± 0.033 |
| 41 | ¹²⁵I-BoNT | A | RAEC | + | | 0.376 ± 0.014 |
| 42 | ¹²⁵I-BoNT | A | RAEC | | + | 0.159 ± 0.027 |
| 43 | ¹²⁵I-HC | A | RAEC | + | | 0.140 ± 0.050 |
| 44 | ¹²⁵I-HC | A | RAEC | | + | 0.132 ± 0.026 |
| 45 | ¹²⁵I-BoNT | A | mRT | + | | |
| 46 | ¹²⁵I-HC | A | mRT | + | | |
| 47 | 6xHis-50 kHC | A | mRT | + | | |
| 48 | GST-50 kHC | A | mRT | + | | |
| 49 | GST-50 kHC | A | mRT | + | | |
| 50 | 6xHis-50 kHC | A | mRT | + | | ± |
| 51 | CTBS-50 kHC | A | mRT | + | | |
| 52 | full length HC | A | oral | + | | |
| | (100 kDa) | | | | | |
| 53 | HC and its | A & B | in vivo; | + | + | — |
| | fragments | | in vitro | | | |

^{A}Abbreviations are as follows:
BoNT = Clostridium botulinum nerurotoxin (holotoxin);
nBoNT = nicked BoNT, i.e., BoNT precursor polypeptide that has been cleaved into HC and LC, that are linked by a disulfide bond;
uBoNT = un-nicked BoNT i.e., BoNT precursor polypeptide (150 kDa) that remains uncleaved;
HC = heavy chain of Clostridium botulinum neurotoxin;
88 kHC = 88 kilodalton HC carboxyterminal fragment (see FIG. 2);
66 kHC = 66 kilodalton HC carboxyterminal fragment (see FIG. 2);
50 kHC = 50 kilodalton HC carboxyterminal fragment (see FIG. 2);
48 kHC = the 50 kHC fragment from which 2 kilodaltons of the carboxy terminus have been excised (see FIG. 2);
AF = ALEXA FLUOR ® 568 fluorescent dye;
bt = biotin;
GFP = green fluorescent protein;
GST = glutathione-S-transferase;
Stag = S-TAG ™ System (15aa S•Tag peptide with ribonuclease S-protein, available from Novagen, Inc., Madison, Wisconsin, U.S.A.);
6xhis = hexahistidine label; and
CTBS = cholera toxin B subunit;
^{B}Cell types are as follows:
T-84 = T-84 human gut epithelial cells;
MDCK = Madin-Darby canine kidney epithelial cells;
Caco-2 = Caco-2 human gut epithelial cells;
Calu-3 = Calu-3 human pulmonary epithelial cells;
RAEC = rat alveloar epithelial cells; and
mRT = murine respiratory tract cells, in vivo.
^{C}A = apical face of cells and B = basolateral face of cells.
^{D}Rates are reported as means ± standard error of the mean, in femtomoles per hour per square centimeter of epithelium surface.

[0318] ^{A}Abbreviations are as follows:

[0319] BoNT=Clostridium botulinum neurotoxin (holotoxin);

[0320] nBoNT=nicked BoNT, i.e., BoNT precursor polypeptide that has been cleaved into HC and LC, that are linked by a disulfide bond;

[0321] uBoNT=un-nicked BoNT i.e., BoNT precursor polypeptide (150 kDa) that remains uncleaved;

[0322] HC=heavy chain of Clostridium botulinum neurotoxin;

[0323] 88 kHC=88 kilodalton HC carboxyterminal fragment (see FIG. 2);

[0324] 66 kHC=66 kilodalton HC carboxyterminal fragment (see FIG. 2);

[0325] 50 kHC=50 kilodalton HC carboxyterminal fragment (see FIG. 2);

[0326] 48 kHC=the 50 kHC fragment from which 2 kilodaltons of the carboxy terminus have been excised (see FIG. 2);

[0327] AF=ALEXA FLUOR® 568 fluorescent dye;

[0328] bt=biotin;

[0329] GFP=green fluorescent protein;

[0330] GST=glutathione-S-transferase;

[0331] Stag=S-TAG™ System (15aa S●Tag peptide with ribonuclease S-protein, available from Novagen, Inc., Madison, Wis., U.S.A.);

[0332] 6×his=hexahistidine label; and

[0333] CTBS=cholera toxin B subunit.

[0334] ^{B}Cell types are as follows:

[0335] T-84 =T-84 human gut epithelial cells;

[0336] MDCK=Madin-Darby canine kidney epithelial cells;

[0337] Caco-2=Caco-2 human gut epithelial cells;

[0338] Calu-3=Calu-3 human pulmonary epithelial cells;

[0339] RAEC=rat alveolar epithelial cells; and

[0340] mRT=murine respiratory tract cells, in vivo.

[0341] ^{C}A=apical face of cells and B=basolateral face of cells.

[0342] ^{D}Rates are reported as mean±standard error of the mean, in femtomoles per hour per square centimeter of epithelium surface.

[0343] The materials and methods used in the examples described herein, except as noted in the individual examples, are now described.

### Native and Recombinant Proteins Native Toxin and Native Chains.

[0344] Botulinum neurotoxin (BoNT), as well as the HC and light chain (LC) components, was isolated by standard techniques that have been well described in the literature (DasGupta and Sathyamoorthy, 1984; Simpson et al., 1988).

### Construction of the Plasmid Expressing the BoNT LC.

[0345] Standard techniques for DNA fragment isolation, repair of overhanging ends with the Klenow fragment of DNA polymerase I, and ligation with T4 DNA ligase were used. All cloning steps and expression were performed in E. coli M-15 (obtained from Qiagen, Chatsworth, Calif., U.S.A.) containing the pREP4 repressor plasmid. A DNA fragment coding for the BoNT LC (rL chain) was amplified from plasmid pCL8 using primers having the following sequences: forward, CCCAATAACA ATTAACAACT TTAAT (SEQ ID NO: 8); and reverse, TTTctgcagC TATTTRATTAT ATAATGATCT ACCATC (SEQ ID NO: 9), where the PstI restriction site is in lowercase characters. One cytosine was added to the 5′ end of the forward primer to provide for reconstruction of the BamHI restriction site, as well as to clone light-chain DNA in frame with the pQE-30 initiation of translation methionine. In the reverse primer, a PstI restriction site was introduced immediately downstream of the stop codon. The amplified product was purified, treated with T4 polymerase, cut with PstI, and inserted between the Klenow-filled-in BamHI and PstI restriction sites of the expression vector pQE-30 to yield plasmid pQE-LC1. The structure of pQE-LC1 was confirmed by DNA sequencing.

### Construction of Plasmid Expressing Truncation Mutants of HC (Carboxyterminal HC Fragment).

[0346] The structural gene (having the nucleotide sequence SEQ ID NO: 10, as listed in GENBANK™ accession no. X73423) encoding the eighty-eight kilodalton (88 K), sixty-six kilodalton (66 K), or fifty kilodalton (50 K) fragments of HC of BoNT serotype A (BoNT A) were generated by PCR. These HC fragments are herein designated “88 kHC,” “66 kHC,” and “50 kHC.”

[0347] DNA fragment (nucleotide residues 1609-3987 of SEQ ID NO: 10; SEQ ID NO: 11) encoding 88 kHC was amplified using the following oligonucleotide primers: forward primer (nucleotide residues 1609-1632 of SEQ ID NO: 10) CGCggtaccA CCTTTAATTT TGATAATGAA CCT (SEQ ID NO: 12), reverse primer (nucleotide residues 3987-3968 of SEQ ID NO: 10) AACCCctgca gTTACAGTGG CCTTTCTCCC C (SEQ ID NO: 13), where the KpnI restriction site in the forward primer sequence and the PstI restriction site in the reverse primer sequence are in lower case characters.

[0348] DNA fragment (nucleotide residues 2170-3987 of SEQ ID NO: 10; SEQ ID NO: 14) encoding 66 kHC was amplified using the following oligonucleotide primers: forward primer (nucleotide residues 2170-2193 of SEQ ID NO: 10) CGCggtaccG TTCAAACAAT AGATAATGCT TTA (SEQ ID NO: 15), reverse primer (nucleotide residues 3987-3968 of SEQ ID NO: 10) AACCCctgca gTTACAGTGG CCTTTCTCCC C (SEQ ID NO: 13), where the KpnI restriction site in the forward primer sequence and the PstI restriction site in the reverse primer sequence are in lower case characters.

[0349] DNA fragment (nucleotide residues 2689-3987 of SEQ ID NO: 10; SEQ ID NO: 16) encoding 50 kHC was amplified using the following oligonucleotide primers: forward primer (nucleotide residues 2689-2712 of SEQ ID NO: 10) TCTTggatcc ACATTTACTG AATATATTAA GAAT (SEQ ID NO: 17), reverse primer (nucleotide residues 3987-3968 of SEQ ID NO: 10) TTCTgagctc TTACAGTGCC TTTCTCCCC (SEQ ID NO: 14), where the BamHI restriction site in the forward primer sequence and the SacI restriction site in the reverse primer sequence are in lower case characters.

[0350] PCR amplified fragments encoding deletion derivatives of the BoNT HC were treated with respective restriction endonucleases and cloned into plasmid pQE-30 in frame with the ATG codon and a 6×His Tag. The three resultant clones thus obtained were designated as pQE-BoNT/A HC88, pQE-BoNT/A HC66 and pQE-BoNT/A HC50, harboring deletion fragments of the BoNT A HC gene encoding 88 kHC, 66 kHC and 50 kHC, respectively. All cloning and expression were performed in E. coli strain BL21 codon plus (DE3)-RIL (obtained from Stratagene, La Jolla, Calif., U.S.A.). All the recombinant clones were confirmed by DNA sequencing.

### Construction of Plasmid Expressing GFP-66 kHC Fusion.

[0351] The coding sequence of green fluorescent protein (GFP) was generated by PCR. A DNA fragment encoding 26 kilodalton (26K) GFP protein was amplified using primers having the following nucleotide sequences: forward primer ACATgcatgc ATGAGTAAAG GAGAAGAACT TC (SEQ ID NO: 18), reverse primer CCggtaccCC AGGCCCATTT GTAGAGCTCA TC (SEQ ID NO: 19), where the SphI restriction site in the forward primer sequence and the KpnI restriction site in the reverse primer sequence are in lower case characters. The amplified fragment harboring GFP gene was treated with SphI and KpnI and inserted between the SphI and KpnI restriction sites of plasmid pQE-66 kHC. The resultant plasmid pQE-GFP-66 kHC contained the GFP gene in frame with the ATG codon, 6×His tag and 66 kHC gene.

### Expression and Purification of Recombinant Proteins.

[0352] Cultures were grown in Lennox broth at 37° C., with shaking, to an absorbance value at 600 nanometers (A₆₀₀) of 0.6 to 0.8. Isopropyl-beta-D-thiogalactopyranoside (IPTG) was added to 1.0 millimolar (final concentration), and incubation was continued for an additional 5 hours. Bacteria from 1 liter of induced culture were harvested by centrifugation at 4° C. and re-suspended in 20 milliliters of 50 millimolar sodium phosphate buffer (pH. 7.4) with 300 millimolar NaCl. The cell suspension was lysed on ice by sonication, with two pulses of 1 minute each at 75% power, with a model 60 sonic dismembrator (Fisher Scientific, Malvern, Pa., U.S.A.). Lysates were centrifuged at 20000×g for 30 minutes at 4° C. The clarified supernatants were mixed with 2 milliliters of packed nitriletriacetic resin, incubated for one hour at 4° C. on a rotator, and finally poured into a 25-milliliter column.

[0353] The column was washed with 30 volumes of washing buffer (50 millimolar sodium phosphate (pH 6.0), 300 millimolar NaCl, 25 millimolar imidazole). Bound proteins were eluted with elution buffer (50 millimolar sodium phosphate (pH 4.5), 300 millimolar NaCl). Purified proteins were analyzed by sodium dodecyl sulfate-polyacrylamide gel electrophoresis (SDS-PAGE) and Western blotting.

### Nicking of BoNT

[0354] Botulinum toxin is expressed as a relatively inactive single chain molecule. To become fully active, the toxin must undergo proteolytic processing (“nicking”)” to yield its dichain form. In the laboratory, this is typically accomplished with trypsin.

[0355] In order to facilitate the subsequent separation of toxin from the nicking enzyme, TPCK (L-1-tosylamido-2-phenylethyl chloromethyl ketone) treated trypsin cross-linked to 4% beaded agarose was used (Immobilized Trypsin; PIERCE, Rockford, Ill., U.S.A.). The trypsin slurry was washed 3 times with reaction buffer (10 millimolar Sodium Phosphate Buffer, pH 7.5). Toxin was added and incubated with enzyme at room temperature (23° C.) for one hour at a 1:10 ratio of trypsin to toxin. After incubation, the reaction mixture was centrifuged at 10,000 rotations per minute in an Eppendorf tabletop centrifuge for 5 minutes. The supernatant containing “nicked” toxin was collected and stored at −20° C. Alternatively, “nicked” toxin can be separated from the beaded trypsin by filtration through a 0.2 micron centrifugal filter (Schleicher & Schuell Centrex Microfilter Unit) into a clean, sterile tube. A sample of the material is examined by electrophoresis to verify nicking.

### Reduction of BoNT

[0356] Dichain toxin consists of a LC (enzymatic portion) and a HC (binding and translocation portion) linked by a disulfide bond. This bond must be reduced (broken) for the light chain to exert its enzymatic activity, the cleavage of proteins responsible for neurotransmitter release. In order to perform in vitro cleavage experiments, native toxin has to be reduced.

[0357] Botulinum toxin was reduced by incubating it with dithiothreitol (DTT; Cleland's Reagent) in phosphate buffer at physiological pH (pH 7.2-7.4) or in phosphate buffered saline (PBS). The concentration of DTT typically used was 5 millimolar to 20 millimolar, depending on the experiment. The DTT and toxin reaction mixture was incubated at room temperature (23° C.) for one hour. Toxin reduction was verified by electrophoresis on non-reducing gels.

### Attachment of ¹²⁵I-Bolton Hunter Reagent (MW 387.2) to Purified BoNT and its Fragments

[0358] Bolton-Hunter reagent was purchased from PerkinEImer Life Sciences, Inc. (Boston, Mass., U.S.A.). This molecule is supplied with a reactive succinimidyl ester moiety that reacts with primary amines of proteins (e.g., lysine residues). The toxin, HC or its fragments were iodinated using (¹²⁵I)-Bolton Hunter reagent essentially according to manufacturer's instructions. The reaction time was reduced in order to diminish the loss of biological activity of the resulting product. The proteins were labeled to an average specific activity of 500 Curies per millimole or less.

[0359] Purified protein (350 micrograms) in borate buffer (pH 7.8; 200 microliters) was added to dried, iodinated ester and reacted on ice for fifteen minutes. The reaction was terminated by addition of 50 microliters of 1 molar glycine in borate buffer for fifteen minutes. The total reaction mixture (250 microliters) and rinse (250 microliters) were loaded onto a SEPHADEX™ G-25 column that was pre-equilibrated with filtration buffer (150 millimolar Na₂HPO₄, 150 millimolar NaCl, 0.1% (w/v) gelatin, pH 7.4). The labeled toxin was eluted with filtration buffer, and 0.5 milliliter fractions were collected. An aliquot (5 microliters) of each fraction was assayed for radioactivity. The labeled toxin peak, which eluted at void volume, was pooled and stored at 3° C. Toxin concentration in the pooled fraction was determined spectrophotometrically at 278 nanometers using the following relationship 1.63 A₂₇₈=1 milligram per milliliter. A portion of this sample was counted in a gamma-counter to quantify the labeled toxin. Sample concentration and associated counts were used to calculate specific activity. Labeled toxin was stored at 3° C.

### Attachment of ALEXA FLUOR® 568 (MW 792) to Purified BoNT

[0360] ALEXA FLUOR® 568 is a dye molecule with an absorption (excitation) maximum at 577 nanometers and an emission maximum at 603 nanometers. The dye was purchased from Molecular Probes (Eugene, Oreg., United States of America) and was used according to manufacturer's directions. This molecule is supplied with a reactive succinimidyl ester moiety that reacts with primary amines of proteins (e.g., lysine residues). 0.50 Milliter of a 1.0 milligram per milliliter solution of PBS with purified BoNT A was supplemented with 50 microliters of 1.0 molar sodium bicarbonate, and subsequently added to the dye. The reaction continued with stirring for one hour at room temperature. Hydroxylamine solution (17 microliters) was added, and incubation was continued an additional 30 minutes at room temperature to stop the reaction. The entire reaction volume was then filtered through a gel filtration column equilibrated with and eluted with PBS. The first colored band that eluted from the column (labeled toxin) was collected and stored at 3° C. The amount of labeling was calculated according to the manufacturer's instructions, employing the extinction coefficients of the ALEXA FLUOR® dye and the toxin. The toxin used in transcytosis experiments was labeled with 3 to 7 moles of dye per mole of toxin.

### Transcytosis Assay

[0361] Monolayers of polarized epithelial cells are grown on polycarbonate membranes with a 0.4 micrometer pore size in TRANSWELL® (Corning-Costar, Cambridge, Mass., U.S.A.) porous bottom inserts. The TRANSWELL® apparatus permits containment of a product on either the apical or basolateral face of an epithelial cell culture. In the absence of transcytosis of the product across the epithelial cell layer, substantially all of the product is retained on one side of the epithelium by the apparatus. The TRANSWELL® apparatus is therefore useful for assessing transepithelial transcytosis of products.

[0362] The cell growth area within each TRANSWELL® insert is equivalent to one square centimeter. Prior to seeding cells, insert membranes were coated with 10 micrograms per square centimeter rat tail type I collagen. Collagen stock solution (6.7 milligrams per milliliter) was prepared in sterile 1% (v/v) acetic acid and stored at 3° C. This collagen stock solution was diluted, as needed, in ice cold 60% (v/v) ethanol, and 150 microliters of the resulting solution containing 10 micrograms of diluted collagen was added to each well.

[0363] The collagen solution was allowed to dry at room temperature overnight (about eighteen hours). After drying, the wells were sterilized under UV light for one hour, followed by a pre-incubation with cell culture medium (thirty minute incubation). The pre-incubation medium was removed immediately prior to addition of cells and fresh medium. Cells were plated in the TRANSWELL® apparatus at confluent density. The volumes of medium added were 0.5 milliliter to the upper chamber and 1.0 milliliter to the bottom chamber. Culture medium was changed every two days. The cultures maintained in twelve-well plates were allowed to differentiate a minimum of ten days before use. The integrity of cell monolayers and formation of tight junctions were visualized by monitoring the maintenance of a slightly higher medium meniscus in the inserts as compared to the bottom wells. Formation of tight junctions were confirmed experimentally by assaying the rate of (³H)-inulin diffusion from the top well into the bottom chamber or by measurement of transepithelial resistance across the monolayer.

[0364] Transcytosis was assayed by replacement of medium, usually in the top well, with an appropriate volume of medium containing various concentrations of (¹²⁵I)-labeled protein of interest. Transport of radiolabeled protein was monitored by sampling the entire content of opposite wells, which was usually the bottom wells. Aliquots (0.5 milliliter) of the sampled medium were filtered through a SEPHADEX™ G-25 column, and 0.5 milliliter fractions were collected. The amount of radioactivity in the fractions was determined using a gamma counter. The amount of transcytosed protein was normalized and expressed as femtomoles per hour per square centimeter of cultured cell surface. A minimum of two replicates per condition were included in each experiment, and experiments were typically reproduced at least three times.

### Toxicity Testing In vitro toxicity testing.

[0365] The toxicity of expressed proteins was bioassayed on mouse phrenic nerve-hemidiaphragm preparations. Tissues were excised and suspended in physiological buffer that was aerated with 95% O₂, 5% CO₂ and maintained at 35° C. The physiological solution had the following composition: 137 millimolar NaCl; 5 millimolar KCl; 1.8 millimolar CaCl₂; 1.0 millimolar MgSO₄; 24 millimolar NaHCO₃; 1.0 millimolar NaH₂PO₄; 11 millimolar D-glucose; and 0.01% (w/v) gelatin. Phrenic nerves were stimulated continuously (1.0 Hertz; 0.1-0.3 millisecond duration), and muscle twitch was recorded. Toxin-induced paralysis was measured as a 50% reduction in muscle twitch response to neurogenic stimulation.

### In Vivo Toxicity Testing.

[0366] The toxicity of expressed proteins was tested by administering the proteins to laboratory mice. Proteins purified by elution from a histidine affinity resin or GST affinity resin were diluted in PBS including 1 milligram per milliliter bovine serum albumin (BSA) and injected intraperitoneally (i.p.) to mice. The recombinant proteins were administered in a 100 microliters aliquot of PBS-BSA at concentrations of 1 to 100 micrograms per animal (average weight of approximately 25 grams). Animals were monitored for varying lengths of time to detect any non-specific toxicity.

### Surgical Administration of Toxin or Fragments into Stomach or Intestine

[0367] Swiss-Webster mice (female, 25 grams each), were purchased from Ace Animals (Boyertown, Pa., U.S.A.) and allowed unrestricted access to food and water.

[0368] Pre-operative protocol involved fasting animals for eighteen hours prior to surgery, although allowing free access to water. Pre-operative preparation also included shaving the abdominal area and administering a prophylactic, subcutaneous dose of gentamicin sulfate (6 milligrams per kilogram body weight. (available from Fujusawa USA, Inc., Deerfield, Ill., U.S.A.). On the day of surgery, animals were transferred to a veterinary procedure room, and all subsequent steps were performed in an aseptic surgical environment.

[0369] Animals were anesthetized by administration of Isoflurane (ISO-THESIA™, Abbott Laboratories North, Chicago, Ill., U.S.A.) and oxygen, and this same inhalation anesthetic was administered throughout surgery. An abdominal laparotomy (about 1.5 to 2.5 centimeters, depending on the size of the mouse) was performed, and either the stomach or the small intestine immediately proximal to the stomach was partially externalized. If required by protocol, a ligature was placed immediately above (proximal to the stomach) the pyloric sphincter using 3-0 PROLENE™ (polypropylene suture, Ethicon, Inc., Somerville, N.J., U.S.A.). Care was taken so that this ligature was sufficient to prevent flow of stomach juices into the intestine (or reverse flow of intestinal contents into the stomach), but not sufficient to cause mechanical damage to the tissues involved. Neurotoxin was administered through a 1 milliliter tuberculin syringe with a 0.5 inch, 27 gauge needle. Injection volumes were kept constant at 100 microliters per animal regardless of site of administration (stomach or intestine). For all injections, the vehicle consisted of sterile Dulbecco's PBS (pH 7.4) with 1 milligram BSA per milliliter. Neurotoxin was administered into the lumen of the stomach by injection through the stomach wall at the greater curvature, with care to avoid the gastro-epiploic vessels. Neurotoxin was administered into the lumen of the small intestine by oblique insertion of the needle parallel to the segment and always in a direction away from the stomach. The time of injection was recorded.

[0370] After administration of neurotoxin, organs were gently repositioned and the incision in the abdominal muscle was sutured using 3-0 PROLENE™. The skin was closed using several small wound clips, after which animals received an analgesic injection of buprenorphine hydrochloride (2 milligrams per kilogram body weight subcutaneously; BUPRENEX® injectable, Reckitt & Colman Pharmaceuticals, Inc., Richmond, Va., United States of America) and another dose of Gentamicin.

[0371] The surgical procedure lasted approximately fifteen minutes per animal, and suspension of anesthesia resulted in full recovery within ten to fifteen minutes. Animals were then transferred to the laboratory where they were monitored for assay endpoint. The time of death was recorded, and total elapsed minutes from time of injection to time of death were calculated.

### Method for Immunization

[0372] Toxin variants that retain the ability to bind and cross gut and airway epithelial cells were tested for their abilities to evoke immunity following oral and/or intranasal administration. To be judged worthy of further consideration, a potential oral or inhalation vaccine had to evoke protection against at least 1000 MLD₅₀ of the parent toxin. Specific pathogen-free female Swiss-Webster mice were used in this work.

[0373] For subcutaneous (s.c.) immunization, animals received 1-20 micrograms protein in 0.1 milliliter of PBS. Four doses were given at fourteen day intervals. The mice were bled seven days after the second, third and fourth immunization and analyzed by immunoblotting for immunoreactivity to toxin variants. Mice were challenged with at least 1×10³ MLD₅₀ of parent toxin via the intraperitoneal (i.p.) route. Prior to injection, toxin was diluted in PBS containing 1% (w/v) gelatin. Mice were challenged fourteen days following their final vaccination, and untreated mice were used as controls.

[0374] For intranasal immunization, mice received 1-20 micrograms of protein suspended in 20 microliters of PBS. Mice were lightly anesthetized with isoflurane (ISO-THESIA™, Abbott Laboratories North, Chicago, Ill., U.S.A.). Protein was administered by a single application of 10 to 20 microliters of the suspension to the nares. The heads of animals were maintained in an upright position to minimize drainage into the posterior pharynx. Five doses were given at seven day intervals. The mice were bled seven days after the third, fourth, and fifth immunization and the specimens were analyzed by immunoblotting for immunoreactivity to toxin variants. Mice were challenged with at least 1×10³ MLD₅₀ of parent toxin via the i.p. route ten days following their final vaccination.

[0375] Oral immunizations were performed by inoculation of 1-20 micrograms of protein suspended in 100 microliters of PBS. Mice were lightly anesthetized with isoflurane (ISO-THESIA™, Abbott Laboratories North, Chicago, Ill., United States of America), and protein was administered by a single application via a feeding tube. Five doses were given at seven day intervals. The mice were bled seven days after the third, fourth, and fifth immunization, and specimens were analyzed by immunoblotting for immunoreactivity to toxin variants. Mice were challenged with at least 1×10³ MLD₅₀ of parent toxin via the i.p. route ten days following their final vaccination.

### Oral Immunization

[0376] Swiss-Webster mice (female, 20-25 grams each) were purchased from Ace Animals (Boyertown, Pa., U.S.A.) and allowed unrestricted access to food and water. The mice were immunized per os (p.o.). For p.o. administration, each animal was fed 4 micrograms of protein suspended in 0.2 milliliter elution buffer administered through an intragastric feeding needle. Mice were immunized on day 0, and boosters were given on days 14, 28, and 42. Samples of serum from identically immunized mice were collected and pooled on days 21, 35, and 49. For collection of serum, mice were bled with capillary tubes at the retro-orbital plexus while under isoflurane anesthesia.

[0377] Sera from immunized or control mice were assayed for antibodies using immunoblot analysis. Recombinant antigen (holotoxin or fragment; 0.1 microgram/lane) was separated by SDS-PAGE and transferred to nitrocellulose membranes. Membranes were blocked with 5% (w/v) non-fat powdered milk in Tris-buffered saline (TBS), cut into strips and processed for detection of immunoreactive proteins using various serum samples.

[0378] Primary incubations were performed overnight (eighteen hours) at room temperature with 1:1000 diluted serum. A secondary horseradish peroxidase-labeled anti-mouse IgG was used at 1:10000 dilution for one hour at room temperature. After extensive washing, membranes were developed using enhanced chemiluminescent reagents (ECL™, Amersham Biosciences, Piscataway, N.J., U.S.A.).

### Enzyme Linked Immunosorbent Assays (ELISA)

[0379] ELISA was performed as described by Siegel, with only minor modifications. Highly purified (>95%) BoNT A was diluted to 5 micrograms per milliliter in phosphate-buffered saline, pH 7.4, and then added to microtiter plates (100 microliters/well) that were incubated at 4° C. overnight in a sealed container.

[0380] One percent BSA in TBS with 0.1% (v/v) TWEEN™ 20 was used to block nonspecific binding. Serum samples were initially diluted 1:30 and then serially diluted fourfold for a total of seven dilutions (1:30 to 1:122, 880). Diluted sera were added in duplicate to toxin-coated wells (100 microliters per well). The secondary antibody was alkaline phosphatase-conjugated goat anti-human or anti-mouse IgA or IgG diluted 1:1000. The primary and secondary antibodies were incubated for sixty minutes at 37° C. p-Nitrophenyl phosphate (100 microliters per well) was added as a substrate. Plates were incubated at room temperature for 30 minutes, and absorbance was measured with a microplate reader at 405 nanometers. ELISA titers were defined as the reciprocal of the highest serum dilution giving an absorbance of 0.2 (absorbance units) above background.

### Capture ELISA for Detection of Recombinant BoNT Fragments in Mouse Plasma after Intranasal Administration

[0381] Microtiter plates were coated overnight at 4° C. with 100 microliters per well of a solution containing 1:1000 diluted rabbit anti-botulinum toxoid A in coating buffer (0.1 molar Na₂CO₃, pH 9.6). The remaining sites of absorption were then blocked by the addition of 1% (w/v) BSA in wash buffer (20 millimolar TBS, 0.1% (v/v) TWEEN™ 20, pH 7.6) for one hour at 37° C. The plates were then washed 4 times with wash buffer. Standard curves were prepared by diluting antigen with the appropriate volumes of assay buffer (20 millimolar TBS, pH 7.6) or the appropriate mouse serum. Standards and serum samples (100 microliters per well) were incubated for one hour at 37° C. and the plates were washed as described above. The 1:500 diluted mouse anti-BoNT A HC was added and incubated for one hour at 37° C. The plates were washed three times with wash buffer, and 100 microliters alkaline phosphatase-labeled goat anti-mouse IgG conjugate diluted (1:5000) in wash buffer was added and incubated for one hour at 37° C. After washing the plates, 100 microliters of substrate solution (p-nitrophenyl phosphate) in glycine buffer, pH 10.4 (0.1 molar glycine, 1 millimolar MgCl₂, and 1 millimolar ZnCl₂), was added to each well. The reaction was stopped after 30 minutes incubation at room temperature, and the absorbance was measured at 405 nanometers.

[0382] Cell types used in the examples include T-84 human gut epithelial cells (T-84 and Caco-2 cells), human pulmonary epithelial cells (Calu-3), and Madin-Darby canine kidney epithelial cells (MDCK cells). Cells of these types are available commercially, for example from American Tissue Culture Collection (ATCC), Manassas, Va., U.S.A. Primary cultures of rat epithelial alveolar cells were also used.

### Example 1

### Detection of Transcytosis of BoNT A from the Apical Surface of T-84 Cells to the Basolateral Side of the Cells by Western Blotting

[0383] This experiment was carried out using native BoNT A and human gut epithelial cells (“T-84 cells”). Transcytosis was assayed in T-84 cell cultures using a TRANSWELL® apparatus assay system. Assay was initiated by addition of 1×10⁻⁸ molar native, purified, BoNT A to the upper chamber. Cultures were subsequently incubated for eighteen hours at 37° C. At the end of each experiment, contents of three basal chambers per condition were collected and concentrated in a CENTRICON™ micro-concentrator. The resulting solution was run on 7.5% (w/v) SDS-PAGE and subsequently transferred to nitrocellulose membranes. The identity and molecular weight of the transcytosed molecule was confirmed by Western blotting with anti-HC antibody.

[0384] A Western blot demonstrated that pre-transcytosis control (BoNT A) and BoNT A transcytosed through T-84 cells (i.e., collected from basal chamber) had approximately the same size. Thus, not only did the BoNT A efficiently cross T-84 cells, but the molecular weight of the molecule was unaltered, indicating that the mechanism by which transcytosis was accomplished did not result in modification of BoNT.

### Example 2

### Western Blot of Apical to Basolateral Transcytosed BoNT A in MDCK Cells

[0385] This experiment was carried out using BoNT A and Madin-Darby Canine Kidney Cells (“MDCK cells”). Transcytosis was assayed in MDCK cell cultures using a TRANSWELL® apparatus assay system. Assay was initiated by addition of 1×10⁻⁸ molar native, purified, BoNT A to the upper chamber. Cultures were subsequently incubated for eighteen hours at 37° C. At the end of each experiment, contents of three basal chambers per condition were collected and concentrated in a CENTRICON™ micro-concentrator. The resulting solution was run on 7.5% (w/v) SDS-PAGE and subsequently transferred to nitrocellulose membranes. The identity and molecular weight of the transcytosed molecule was confirmed by Western blotting with anti-HC antibody.

[0386] The Western blot indicated that native BoNT A is poorly bound, internalized, transcytosed, and released by MDCK cells. BoNT A was not detected in medium collected from the basolateral side of cells, leading to the conclusion that BoNT A did not efficiently cross MDCK cells.

### Example 3

### Apical to Basolateral Transcytosis of BoNT A in T-84 Cells

[0387] Transcytosis of BoNT A linked to ¹²⁵I at lysine residues was assayed in human gut epithelial cells (“T-84”) cell cultures using a TRANSWELL® apparatus assay system. Assay was initiated by addition of 1×10⁻⁸ molar (¹²⁵I)-BoNT A to the upper chamber. Cultures were subsequently incubated for eighteen hours at 37° C. At the end of each experiment contents of the basal chamber were collected and gel filtered. Void volume fractions were assayed for radioactivity and the toxin peak was summed to determine total counts. The amount of transcytosis was calculated based on the specific activity of labeled BoNT A.

[0388] The results indicate that BoNT A linked to ¹²⁵It was transported from the apical to the basolateral side of cells. It efficiently crossed T-84 cells at a transcytosis rate of 11.29±0.30 femtomoles per hour per square centimeter.

[0389] There are three major conclusions that stem from the experimental results. First, the purified botulinum neurotoxin is bound, internalized, transcytosed, and released by differentiated, polarized human gut epithelial cells. Second, modification of lysine residues by attachment of ¹²⁵I does not alter the ability of the holotoxin to display these properties. Third, the BoNT A is capable of transporting the ¹²⁵I-Bolton-Hunter reagent from the apical to the basolateral side of human gut epithelial cells.

### Example 4

### Basolateral to Apical Transcytosis of BoNT A in T-84 Cells

[0390] Transcytosis of BoNT A linked to ¹²⁵I at lysine residues was assayed in T-84 cell cultures using a TRANSWELL® apparatus assay system. Assay was initiated by addition of 1×10⁻⁸ molar (¹²⁵I)-BoNT A to the lower chamber. Cultures were subsequently incubated for eighteen hours at 37° C. At the end of each experiment contents of the upper chamber were collected and gel filtered. Void volume fractions were assayed for radioactivity and the toxin peak was summed to determine total counts. The amount of transcytosis was calculated based on the specific activity of labeled BoNT A.

[0391] The results show that BoNT A linked to ¹²⁵I was transported from the basolateral to the apical side of cells. It efficiently crossed T-84 cells, and the rate of transcytosis was quantified at 8.98±0.20 femtomoles per hour per square centimeter.

[0392] There are three major conclusions that stem from the experimental results. First, the purified botulinum neurotoxin is bound, internalized, transcytosed, and released by differentiated, polarized human gut epithelial cells. This process is somewhat less efficient in the basolateral to apical direction than in the reverse direction. Second, modification of lysine residues does not alter the ability of the holotoxin to display these properties. Third, the BoNT A is capable of transporting the ¹²⁵I-Bolton-Hunter reagent from the basolateral to the apical side of human gut epithelial cells.

### Example 5

### Apical to Basolateral Transcytosis of BoNT A in Caco-2 Cells

[0393] Transcytosis of BoNT A linked to ¹²⁵I at lysine residues was assayed in Caco-2 cell cultures using a TRANSWELL® apparatus assay system. Assay was initiated by addition of 1×10⁻⁸ molar (¹²⁵I)-BoNT A to the upper chamber. Cultures were subsequently incubated for eighteen hours at 37° C. At the end of each experiment, contents of the basal chamber were collected and gel filtered. Void volume fractions were assayed for radioactivity and the toxin peak was summed to determine total counts. The amount of transcytosis was calculated based on the specific activity of labeled toxin.

[0394] The results show that purified neurotoxin was transported from the apical to the basolateral side of cells. BoNT A efficiently crossed Caco-2 cells. The rate of transcytosis was quantified at 8.42±0.49 femtomoles per hour per square centimeter.

[0395] There are four major conclusions that stem from the experimental results. First, the purified botulinum neurotoxin is bound, internalized, transcytosed, and released by differentiated, polarized human gut epithelial cells. Second, modification of lysine residues does not alter the ability of the holotoxin to display these properties. Third, the BoNT A is capable of transporting the ¹²⁵I-Bolton-Hunter reagent from the apical to the basolateral side of human gut epithelial cells. Fourth, the HC is capable of transporting more than one molecule (LC & Bolton-Hunter reagent) at a time across human gut epithelial cells.

### Example 6

### Apical to Basolateral Transcytosis of BoNT A in MDCK Cells

[0396] Transcytosis of BoNT A linked to ¹²⁵I at the lysine residues was assayed in Madin-Darby Canine Kidney (“MDCK”) cell cultures using a TRANSWELL® apparatus assay system. Assay was initiated by addition of 1×10⁻⁸ molar (¹²⁵I)-BoNT A to the upper chamber. Cultures were subsequently incubated for eighteen hours at 37° C. At the end of each experiment, contents of the basal chamber were collected and gel filtered. Void volume fractions were assayed for radioactivity and the toxin peak was summed to determine total counts. The amount of transcytosis was calculated based on the specific activity of labeled BoNT A.

[0397] The results show that BoNT A was poorly transported from the apical to the basolateral side of cells. Purified neurotoxin did not efficiently cross MDCK cells, as evidenced by the rate of transcytosis of 0.05±0.01 femtomoles per hour per square centimeter.

[0398] The BoNT A is poorly bound, internalized, transcytosed, and released by polarized MDCK cells.

### Example 7

### Apical to Basolateral Transcytosis of Un-Nicked Botulinum Neurotoxin Serotype B in T-84 Cells

[0399] Transcytosis of un-nicked botulinum neurotoxin linked to ¹²⁵I at lysine residues was assayed in T-84 cell cultures using a TRANSWELL® apparatus assay system. Assay was initiated by addition of 1×10⁻⁸ molar (¹²⁵I)-uBoNT B to the upper chamber. Cultures were subsequently incubated for eighteen hours at 37° C. At the end of each experiment contents of the basal chamber were collected and gel filtered. Void volume fractions were assayed for radioactivity and the toxin peak was summed to determine total counts. The amount of transcytosis was calculated based on the specific activity of labeled uBoNT.

[0400] The results show that uBoNT was transported from the apical to the basolateral side of cells. It efficiently crossed T-84 cells at a rate of 9.01±0.44 femtomoles per hour per square centimeter.

[0401] There are four major conclusions that stem from the experimental results. First, the purified, un-nicked botulinum neurotoxin, serotype B, is bound, internalized, transcytosed, and released by differentiated, polarized human gut epithelial cells. Second, modification of lysine residues does not alter the ability of the uBoNT to display these properties. Third, the uBoNT is capable of transporting the ¹²⁵I-Bolton-Hunter reagent from the apical to the basolateral side of human gut epithelial cells. Fourth, the HC of uBoNT is capable of transporting more than one molecule (LC portion & Bolton-Hunter reagent) at a time across human gut epithelial cells.

### Example 8

### Apical to Basolateral Transcytosis of Un-Nicked Botulinum Neurotoxin Serotype B in MDCK Cells

[0402] Transcytosis of un-nicked botulinum neurotoxin linked to ¹²⁵I at lysine residues was assayed in Madin-Darby Canine Kidney (“MDCK”) cell cultures using a TRANSWELL® apparatus assay system. Assay was initiated by addition of 1×10⁻⁸ molar (¹²⁵I)-Botulinum toxin type B to the upper chamber. Cultures were subsequently incubated for eighteen hours at 37° C. At the end of each experiment, contents of the basal chamber were collected and gel filtered. Void volume fractions were assayed for radioactivity and the toxin peak was summed to determine total counts. The amount of transcytosis was calculated based on the specific activity of labeled toxin.

[0403] The results show that uBoNT B was poorly transported from the apical to the basolateral side of cells. It did not efficiently cross MDCK cells (0.05±0.00 femtomoles per hour per square centimeter). The uBoNT serotype B is poorly bound, internalized, transcytosed, and released by polarized MDCK cells.

### Example 9

### Basolateral to Apical Transcytosis of Un-Nicked Botulinum Neurotoxin Serotype B in T-84 Cells

[0404] Transcytosis of un-nicked botulinum neurotoxin linked to ¹²⁵I at lysine residues was assayed in T-84 cell cultures using a TRANSWELL® apparatus assay system. Assay was initiated by addition of 1×10⁻⁸ molar (¹²⁵I)-uBoNT B to the lower chamber. Cultures were subsequently incubated for eighteen hours at 37° C. At the end of each experiment contents of the apical chamber were collected and gel filtered. Void volume fractions were assayed for radioactivity and the toxin peak was summed to determine total counts. The amount of transcytosis was calculated based on the specific activity of labeled uBoNT.

[0405] The results show that uBoNT was transported from the basolateral to the apical side of cells. uBoNT efficiently crossed T-84 cells at a rate of 4.48±0.00 femtomoles per hour per square centimeter.

[0406] Several conclusions may be drawn. First, uBoNT is bound, internalized, transcytosed, and released by differentiated, polarized human gut epithelial cells. Second, modification of lysine residues does not alter the ability of uBoNT to display these properties. Third, the uBoNT is capable of transporting the ¹²⁵-Bolton-Hunter reagent from the basolateral to the apical side of human gut epithelial cells. Fourth, the HC of uBoNT is capable of transporting more than one molecule (LC & Bolton-Hunter reagent) at a time across human gut epithelial cells.

### Example 10

### Basolateral to Apical Transcytosis of Un-Nicked Botulinum Neurotoxin Serotype B in MDCK Cells

[0407] Transcytosis of un-nicked botulinum neurotoxin linked to ¹²⁵I at lysine residues was assayed in Madin-Darby Canine Kidney (“MDCK”) cell cultures using a TRANSWELL® apparatus assay system. Assay was initiated by addition of 1×10⁻⁸ molar (¹²⁵I)-uBoNT to the lower chamber. Cultures were subsequently incubated for eighteen hours at 37° C. At the end of each experiment, contents of the apical chamber were collected and gel filtered. Void volume fractions were assayed for radioactivity and the toxin peak was summed to determine total counts. The amount of transcytosis was calculated based on the specific activity of labeled uBoNT.

[0408] The results show that purified uBoNT was poorly transported from the basolateral to the apical side of cells. Purified uBoNT did not efficiently cross MDCK cells (0.05±0.00 femtomoles per hour per square centimeter).

[0409] The purified uBoNT B is poorly bound, internalized, transcytosed, and released by polarized MDCK cells.

### Example 11

### Apical to Basolateral Transcytosis of Nicked Botulinum Neurotoxin Serotype B in T-84 Cells

[0410] Transcytosis of nicked BoNT B linked to ¹²⁵I at lysine residues was assayed in T-84 cell cultures using a TRANSWELL® apparatus assay system. Assay was initiated by addition of 1×10⁻⁸ molar (¹²⁵I)-nBoNT B to the upper chamber. Cultures were subsequently incubated for eighteen hours at 37° C. At the end of each experiment contents of the basal chamber were collected and gel filtered. Void volume fractions were assayed for radioactivity and the toxin peak was summed to determine total counts. The amount of transcytosis was calculated based on the specific activity of labeled nBoNT B.

[0411] The results show that purified and nicked neurotoxin was transported from the apical to the basolateral side of cells. Purified neurotoxin efficiently crossed T-84 cells at a rate of 6.57±0.07 femtomoles per hour per square centimeter.

[0412] Several conclusions may be drawn. First, the purified, nBoNT B is bound, internalized, transcytosed, and released by differentiated, polarized human gut epithelial cells. Second, modification of lysine residues does not alter the ability of the holotoxin to display these properties. Third, the nBoNT B is capable of transporting the ¹²⁵I-Bolton-Hunter reagent from the apical to the basolateral side of human gut epithelial cells. Fourth, the HC of nBoNT B is capable of transporting more than one molecule (LC & Bolton-Hunter reagent) at a time across human gut epithelial cells.

### Example 12

### Apical to Basolateral Transcytosis of Nicked Botulinum Neurotoxin Serotype B in MDCK Cells

[0413] Transcytosis of nBoNT B linked to ¹²⁵I at lysine residues was assayed in Madin-Darby Canine Kidney (“MDCK”) cell cultures using a TRANSWELL® apparatus assay system. Assay was initiated by addition of 1×10⁻⁸ molar (¹²⁵I)-nBoNT B to the upper chamber. Cultures were subsequently incubated for eighteen hours at 37° C. At the end of each experiment, contents of the basal chamber were collected and gel filtered. Void volume fractions were assayed for radioactivity and the toxin peak was summed to determine total counts. The amount of transcytosis was calculated based on the specific activity of labeled nBoNT.

[0414] The results show that purified nBoNT was poorly transported from the apical to the basolateral side of cells. Purified nBoNT did not efficiently cross MDCK cells (0.05±0.00 femtomoles per hour per square centimeter).

[0415] The purified nBoNT B is poorly bound, internalized, transcytosed, and released by polarized MDCK cells.

### Example 13

### Basolateral to Apical Transcytosis of Nicked Botulinum Neurotoxin Serotype B in t-84 Cells

[0416] Transcytosis of nBoNT B linked to ¹²⁵I at the lysine residues was assayed in human gut epithelial (“T-84”) cell cultures using a TRANSWELL® apparatus assay system. Assay was initiated by addition of 1×10⁻⁸ molar (¹²⁵I)-nBoNT B to the lower chamber. Cultures were subsequently incubated for eighteen hours at 37° C. At the end of each experiment contents of the apical chamber were collected and gel filtered. Void volume fractions were assayed for radioactivity and the toxin peak was summed to determine total counts. The amount of transcytosis was calculated based on the specific activity of labeled nBoNT B.

[0417] The results show that nBoNT was transported from the basolateral to the apical side of cells. Purified nBoNT efficiently crossed T-84 cells at a rate of 5.54±0.00 femtomoles per hour per square centimeter.

[0418] Several conclusions may be drawn. First, the purified nBoNT B is bound, internalized, transcytosed, and released by differentiated, polarized human gut epithelial cells. Second, modification of lysine residues does not alter the ability of the nBoNT B to display these properties. Third, nBoNT B is capable of transporting the ¹²⁵I-Bolton-Hunter reagent from the basolateral to the apical side of human gut epithelial cells. Fourth, the HC of nBoNT B is capable of transporting more than one molecule (LC & Bolton-Hunter reagent) at a time across human gut epithelial cells.

### Example 14

### Basolateral to Apical Transcytosis of Nicked Botulinum Neurotoxin Serotype B in MDCK Cells

[0419] Transcytosis of nBoNT B linked to ¹²⁵I at lysine residues was assayed in Madin-Darby Canine Kidney (“MDCK”) cell cultures using a TRANSWELL® apparatus assay system. Assay was initiated by addition of 1±10⁻⁸ molar (¹²⁵I)-BoNT B to the lower chamber. Cultures were subsequently incubated for eighteen hours at 37° C. At the end of each experiment, contents of the apical chamber were collected and gel filtered. Void volume fractions were assayed for radioactivity and the toxin peak was summed to determine total counts. The amount of transcytosis was calculated based on the specific activity of labeled nBoNT.

[0420] The results show that purified nBoNT B was poorly transported from the basolateral to the apical side of cells. Purified nBoNT B did not efficiently cross MDCK cells (0.05±0.00 femtomoles per hour per square centimeter). The purified nBoNT B is poorly bound, internalized, transcytosed, and released by polarized MDCK epithelial cells.

### Example 15

### Western Blot of Apical to Basolateral Transcytosed HC in T-84 Cells

[0421] Transcytosis of HC, serotype A, was assayed in human gut epithelial (“T-84”) cell cultures using a TRANSWELL® apparatus assay system. Assay was initiated by addition of 1×10⁻⁸ molar HC to the upper chamber. Cultures were subsequently incubated for eighteen hours at 37° C. At the end of each experiment, contents of three basal chambers per condition were collected and concentrated in a CENTRICON™ micro-concentrator. The resulting solution was run on 7.5% (w/v) SDS-PAGE and subsequently transferred to nitrocellulose membranes. The identity and molecular weight of the transcytosed molecule was confirmed by Western blotting with anti-HC antibody.

[0422] The results verify that the HC was transported from the apical to the basolateral side of cells. Not only did HC efficiently cross T-84 cells, but the molecular weight of the molecule was unaltered.

[0423] There are two major conclusions that stem from the experimental results. First, the HC of botulinum neurotoxin is bound, internalized, transcytosed, and released by differentiated, polarized human gut epithelial cells. Second, after transcytosis, the molecular size of the native HC released on the basolateral side remains unchanged, leading to the conclusion that the process of transcytosis does not alter the physical structure of the HC.

### Example 16

### Western Blot of Apical to Basolateral Transcytosed HC in MDCK Cells

[0424] Transcytosis of HC, serotype A, was assayed in Madin-Darby Canine Kidney (“MDCK”) cell cultures using a TRANSWELL® apparatus assay system. Assay was initiated by addition of 1×10⁻⁸ molar HC to the upper chamber. Cultures were subsequently incubated for eighteen hours at 37° C. At the end of each experiment, contents of three basal chambers per condition were collected and concentrated in a CENTRICON™ micro-concentrator. The resulting solution was run on 7.5% (w/v) SDS-PAGE and subsequently transferred to nitrocellulose membranes. The identity and molecular weight of the transcytosed molecule was confirmed by Western blotting with anti-HC antibody.

[0425] The results show that the HC was not detected in medium collected from the basolateral side of cells. Thus, HC did not efficiently cross MDCK cells. The HC of botulinum neurotoxin is poorly bound, internalized, transcytosed, and released by polarized MDCK cells.

### Example 17

### Apical to Basolateral Transcytosis of HC in T-84 Cells

[0426] Transcytosis of HC, serotype A, linked to ¹²⁵¹ at lysine residues was assayed in human gut epithelial (“T-84”) cell cultures using a TRANSWELL® apparatus assay system. Assay was initiated by addition of 1×10⁻⁸ molar (¹²⁵I)HC to the upper chamber. Cultures were subsequently incubated for eighteen hours at 37° C. At the end of each experiment, contents of the basal chamber were collected and gel filtered. Void volume fractions were assayed for radioactivity and the toxin peak was summed to determine total counts. The amount of transcytosis was calculated based on the specific activity of labeled HC.

[0427] The results show that the HC was transported from the apical to the basolateral side of cells. Not only did HC efficiently cross T-84 cells, but the rate of transcytosis (7.10±0.00 femtomoles per hour per square centimeter) was comparable to the rate of transcytosis (11.34 femtomoles per hour per square centimeter) for purified BoNT A.

[0428] There are three major conclusions that may be drawn. First, the HC, serotype A, is bound, internalized, transcytosed, and released by differentiated, polarized human gut epithelial cells. Second, modification of lysine residues does not alter the ability of the HC to display these properties. Third, the HC is capable of transporting the ¹²⁵I-Bolton-Hunter reagent from the apical to the basolateral side of human gut epithelial cells.

### Example 18

### Apical to Basolateral Transcytosis of BoNT A HC in MDCK Cells

[0429] Transcytosis of HC, serotype A, linked to ¹²⁵I at lysine residues was assayed in Madin-Darby Canine Kidney (“MDCK”) cell cultures using a TRANSWELL® apparatus assay system. Assay was initiated by addition of 1×10⁻⁸ molar (¹²⁵I)-HC to the upper chamber. Cultures were subsequently incubated for eighteen hours at 37° C. At the end of each experiment, contents of the basal chamber were collected and gel filtered. Void volume fractions were assayed for radioactivity and the toxin peak was summed to determine total counts. The amount of transcytosis was calculated based on the specific activity of labeled HC.

[0430] The results show that the HC was poorly transported from the apical to the basolateral side of cells. HC did not efficiently cross MDCK cells, as evidenced by the rate of transcytosis of 0.06±0.00 femtomoles per hour per square centimeter. The HC, serotype A, is poorly bound, internalized, transcytosed, and released by polarized kidney epithelial cells.

### Example 19

### Western Blot of Apical to Basolateral Transcytosed 66 kHC in T-84 Cells

[0431] Transcytosis of 66 kHC, serotype A, was assayed in human gut epithelial (“T-84”) cell cultures using a TRANSWELL® apparatus assay system. Assay was initiated by addition of 1×10⁻⁸ molar 66 kHC to the upper chamber. Cultures were subsequently incubated for eighteen hours at 37° C. At the end of each experiment, contents of three basal chambers per condition were collected and concentrated in a CENTRICON™ micro-concentrator. The resulting solution was run on 7.5% (w/v) SDS-PAGE and subsequently transferred to nitrocellulose membranes. The identity and molecular weight of the transcytosed molecule was confirmed by Western blotting with anti-HC antibody.

[0432] The results verify that 66 kHC was transported from the apical to the basolateral side of cells. Not only did 66 kHC efficiently cross T-84 cells, but the molecular weight of the molecule was unaltered.

[0433] There are three major conclusions that may be drawn from these results, as follows: First, 66 kHC is bound, internalized, transcytosed, and released by differentiated, polarized human gut epithelial cells. Second, after transcytosis, the molecular size of 66 kHC released on the basolateral side remains unchanged. Third, 66 kHC is capable of transporting a 6×-histidine tag from the apical to the basolateral side of human gut epithelial cells.

### Example 20

### Western Blot of Apical to Basolateral Transcytosed 66 kHC in MDCK Cells

[0434] Transcytosis of 66 kHC, serotype A, was assayed in Madin-Darby Canine Kidney (“MDCK”) cell cultures using a TRANSWELL® apparatus assay system. Assay was initiated by addition of 1×10⁻⁸ molar 66 kHC to the upper chamber. Cultures were subsequently incubated for eighteen hours at 37° C. At the end of each experiment, contents of three basal chambers per condition were collected and concentrated in a CENTRICON™ micro-concentrator. The resulting solution was run on 7.5% (w/v) SDS-PAGE and subsequently transferred to nitrocellulose membranes. The identity and molecular weight of the transcytosed molecule was confirmed by Western blotting with anti-HC antibody.

[0435] The results show that 66 kHC was not detected in medium collected from the basolateral side of cells. Thus, 66 kHC did not efficiently cross MDCK cells. 66 kHC is poorly bound, internalized, transcytosed, and released by polarized MDCK cells.

### Example 21

### Western Blot of Apical to Basolateral Transcytosed 50 kHC in T-84 Cells

[0436] Transcytosis of 50 kHC, serotype A, was assayed in human gut epithelial (“T-84”) cell cultures using a TRANSWELL® apparatus assay system. Assay was initiated by addition of 1×10⁻⁸ molar 50 kHC to the upper chamber. Cultures were subsequently incubated for eighteen hours at 37° C. At the end of each experiment, contents of three basal chambers per condition were collected and concentrated in a CENTRICON™ micro-concentrator. The resulting solution was run on 7.5% (w/v) SDS-PAGE and subsequently transferred to nitrocellulose membranes. The identity and molecular weight of the transcytosed molecule was confirmed by Western blotting with anti-HC antibody.

[0437] The results verify that the 50 kHC fragment was transported from the apical to the basolateral side of cells. Not only did 50 kHC efficiently cross T-84 cells, but the molecular weight of the molecule was unaltered.

[0438] There are three major conclusions that may be drawn from the experimental results. First, 50 kHC is bound, internalized, transcytosed, and released by differentiated, polarized human gut epithelial cells. Second, after transcytosis, the molecular size of the 50 kHC fragment released on the basolateral side remains unchanged. Third, the 50 kHC fragment is capable of transporting a 6×-histidine tag from the apical to the basolateral side of human gut epithelial cells.

### Example 22

### Western Blot of Apical to Basolateral Transcytosed 50 kHC in MDCK Cells

[0439] Transcytosis of 50 kHC, serotype A, was assayed in Madin-Darby Canine Kidney (“MDCK”) cell cultures using a TRANSWELL® apparatus assay system. Assay was initiated by addition of 1×10⁻⁸ molar 50 kHC to the upper chamber. Cultures were subsequently incubated for eighteen hours at 37° C. At the end of each experiment, contents of three basal chambers per condition were collected and concentrated in a CENTRICON™ micro-concentrator. The resulting solution was run on 7.5% (w/v) SDS-PAGE and subsequently transferred to nitrocellulose membranes. The identity and molecular weight of the transcytosed molecule was confirmed by Western blotting with anti-HC antibody.

[0440] The results show that 50 kHC was not detected in medium collected from the basolateral side of cells. Thus, 50 kHC did not efficiently cross MDCK cells. Thus, 50 kHC of botulinum neurotoxin is poorly bound, internalized, transcytosed, and released by polarized MDCK cells.

### Example 23

### Apical to Basolateral Transcytosis of 50 kHC in T-84 Cells

[0441] Transcytosis of 50 kHC, serotype A, linked to ¹²⁵I at lysine residues was assayed in human gut epithelial (“T-84”) cell cultures using a TRANSWELL® apparatus assay system. Assay was initiated by addition of 1×10⁻⁸ molar (¹²⁵I)-50 kHC to the upper chamber. Cultures were subsequently incubated for eighteen hours at 37° C. At the end of each experiment, contents of the basal chamber were collected and gel filtered. Void volume fractions were assayed for radioactivity and the toxin peak was summed to determine total counts. The amount of transcytosis was calculated based on the specific activity of labeled 50 kHC.

[0442] The results show that 50 kHC was transported from the apical to the basolateral side of cells. Not only did 50 kHC efficiently cross T-84 cells, but the rate of transcytosis (13.97±0.00 femtomoles per hour per square centimeter) was comparable to the rate of transcytosis (11.34 femtomoles per hour per square centimeter) for purified BoNT A.

[0443] There are five major conclusions that may be drawn from the experimental results. First, the 50 kHC fragment of botulinum neurotoxin is bound, internalized, transcytosed, and released by differentiated, polarized human gut epithelial cells. Second, modification of lysine residues does not alter the ability of the 50 kHC fragment to display these properties. Third, 50 kHC is capable of transporting the ¹²⁵I-Bolton-Hunter reagent from the apical to the basolateral side of human gut epithelial cells. Fourth, the 50 kHC fragment is capable of transporting a 6×-histidine tag from the apical to the basolateral side of human gut epithelial cells. Fifth, the 50 kHC fragment is capable of transporting more than one molecule (polyhistidine tag & Bolton-Hunter reagent) at a time across human gut epithelial cells.

### Example 24

### Apical to Basolateral Transcytosis of 50 kHC in MDCK Cells

[0444] Transcytosis of 50 kHC, serotype A, linked to ¹²⁵I at lysine residues was assayed in Madin-Darby Canine Kidney (“MDCK”) cell cultures using a TRANSWELL® apparatus assay system. Assay was initiated by addition of 1×10⁻⁸ molar (¹²⁵I)-50 kHC to the upper chamber. Cultures were subsequently incubated for eighteen hours at 37° C. At the end of each experiment, contents of the basal chamber were collected and gel filtered. Void volume fractions were assayed for radioactivity and the toxin peak was summed to determine total counts. The amount of transcytosis was calculated based on the specific activity of labeled 50 kHC.

[0445] The results show that 50 kHC was poorly transported from the apical to the basolateral side of cells. 50 kHC did not efficiently cross MDCK cells, as evidenced by the rate of transcytosis of 0.06±0.00 femtomoles per hour per square centimeter. Thus, 50 kHC fragment of botulinum neurotoxin is poorly bound, internalized, transcytosed, and released by polarized MDCK epithelial cells.

### Example 25

### Apical to Basolateral Transcytosis of ALEXA FLUOR® −568 BoNT A in T-84 Cells

[0446] Transcytosis of ALEXA FLUOR® 568 BoNT A linked to ¹²⁵I at lysine residues was assayed in human gut epithelial (“T-84”) cell cultures using a TRANSWELL® apparatus assay system. Assay was initiated by addition of 1×10⁻⁸ molar ALEXA FLUOR® 568-BoNT A to the upper chamber. Cultures were subsequently incubated for eighteen hours at 37° C. At the end of each experiment contents of the basal chamber were collected and analyzed by fluorescence spectrometry. The relative amount of transcytosis was demonstrated based on the emission peak of the ALEXA FLUOR® 568 BoNT A conjugate.

[0447] The results show that purified BoNT A transported the small molecule from the apical to the basolateral side of cells. Purified BoNT A efficiently crossed T-84 cells, and the small molecule was co-transported.

[0448] There are three major conclusions that stem from the experimental results. First, the purified BoNT A is bound, internalized, transcytosed, and released by differentiated, polarized human gut epithelial cells. Second, modification of lysine residues does not alter the ability of the holotoxin to display these properties. Third, the BoNT A is capable of transporting the ALEXA FLUOR® 568 from the apical to the basolateral side of human gut epithelial cells.

### Example 26

### Apical to Basolateral Transcytosis of ALEXA FLUOR® 568 BoNT A in MDCK Cells

[0449] Transcytosis of ALEXA FLUOR® 568 BoNT A linked to ¹²⁵I at lysine residues was assayed in Madin-Darby Canine Kidney (“MDCK”) cell cultures using a TRANSWELL® apparatus assay system. Assay was initiated by addition of 1×10⁻⁸ molar ALEXA FLUOR® 568-BoNT A to the upper chamber. Cultures were subsequently incubated for eighteen hours at 37° C. At the end of each experiment contents of the basal chamber were collected and analyzed by fluorescence spectrometry. The relative amount of transcytosis was demonstrated based on the emission peak of the ALEXA FLUOR® 568-labeled BoNT A conjugate.

[0450] The results show that purified BoNT A did not efficiently transport the small molecule from the apical to the basolateral side of cells. Purified BoNT A did not efficiently co-transport the small molecule in MDCK cell cultures. The purified BoNT A is poorly bound, internalized, transcytosed, and released by differentiated, polarized canine kidney epithelial cells and therefore, incapable of transporting a small molecule across these cells.

### Example 27

### Apical to Basolateral Transcytosis of Biotin-50 kHC in T-84 Cells

[0451] Transcytosis of biotin-50 kHC, serotype A, was assayed in human gut epithelial (“T-84”) cell cultures using a TRANSWELL® apparatus assay system. Assay was initiated by addition of 1×10⁻⁷ molar biotin-50 kHC to the upper chamber. Cultures were subsequently incubated for eighteen hours at 37° C. At the end of each experiment, contents of three basal chambers per condition were collected and concentrated in a CENTRICON™ micro-concentrator. The resulting solution was run on 7.5% (w/v) SDS-PAGE and subsequently transferred to nitrocellulose membranes. The identity and molecular weight of the transcytosed molecule was confirmed by Western blotting with anti-HC antibody and by probing a duplicate blot with avidin-HRP.

[0452] The results verify that biotin-50 kHC was transported from the apical to the basolateral side of cells. Not only did biotin-50 kHC efficiently cross T-84 cells, but the molecular weight and receptor binding properties of the molecule were unaltered.

[0453] There are six conclusions that can be drawn. First, biotin-50 kHC is bound, internalized, transcytosed, and released by differentiated, polarized human gut epithelial cells. Second, modification of the fragment by addition of biotin does not alter the ability of the 50 kHC fragment to display these properties. Third, the 50 kHC fragment is capable of transporting biotin from the apical to the basolateral side of human gut epithelial cells. Fourth, the transported biotin molecule retains its ligand binding properties and associates with avidin. Fifth, the 50 kHC fragment is capable of transporting a 6×-histidine tag from the apical to the basolateral side of human gut epithelial cells. Sixth, the 50 kHC fragment is capable of transporting more than one molecule (polyhistidine tag and biotin) at a time across human gut epithelial cells.

### Example 28

### Apical to Basolateral Transcytosis of Biotin-50 kHC in MDCK Cells

[0454] Transcytosis of biotin-50 kHC, serotype A, was assayed in Madin-Darby Canine Kidney (“MDCK”) cell cultures using a TRANSWELL® apparatus assay system. Assay was initiated by addition of 1×10⁻⁷ molar biotin-50 kHC to the upper chamber. Cultures were subsequently incubated for eighteen hours at 37° C. At the end of each experiment, contents of three basal chambers per condition were collected and concentrated in a CENTRICON™ micro-concentrator. The resulting solution was run on 7.5% (w/v) SDS-PAGE and subsequently transferred to nitrocellulose membranes. The identity and molecular weight of the transcytosed molecule was confirmed by Western blotting with anti-HC antibody and by probing a duplicate blot with avidin-HRP.

[0455] The results verify that biotin-50 kHC was not efficiently transported from the apical to the basolateral side of cells. Purified 50 kHC did not efficiently co-transport 244 dalton biotin molecule in MDCK cultures.

[0456] There are two conclusions that stem from the experimental results. First, the biotin-50 kHC is not bound, internalized, transcytosed, and released by differentiated, polarized canine kidney epithelial cells. Second, the 50 kHC is not capable of transporting biotin from the apical to the basolateral side of canine kidney epithelial cells.

### Example 29

### Apical to Basolateral Transcytosis of Green Fluorescent Protein-66 kHC T-84 Cells

[0457] Transcytosis of green fluorescent protein-66 kHC, serotype A, was assayed in human gut epithelial (“T-84”) cell cultures using a TRANSWELL® apparatus assay system. Assay was initiated by addition of 1×10⁻⁸ molar GFP-66 kHC to the upper chamber. Cultures were subsequently incubated for eighteen hours at 37° C. At the end of each experiment, contents of the basal chamber were collected and analyzed by fluorescence spectrometry. The relative amount of transcytosis was demonstrated based upon the emission peak of the GFP-66 kHC conjugate.

[0458] The results show that 66 kHC transported the green fluorescent protein-66 kHC from the apical to the basolateral side of cells. Purified fragment efficiently crossed T-84 cells, and the green fluorescent protein-66 kHC was co-transported.

[0459] There are four [six ??]conclusions that can be drawn. First, 66 kHC is bound, internalized, transcytosed, and released by differentiated, polarized human gut epithelial cells. Second, modification of 66 kHC by addition of GFP does not alter the ability of 66 kHC to display these properties. Third, 66 kHC is capable of transporting GFP from the apical to the basolateral side of human gut epithelial cells. Fourth, the transported GFP molecule retains its fluorescence emitting properties. Fifth, 66 kHC is capable of transporting a 6×-histidine tag from the apical to the basolateral side of human gut epithelial cells. Sixth, 66 kHC is capable of transporting more than one molecule simultaneously (polyhistidine tag and GFP) across human gut epithelial cells.

### Example 30

### Apical to Basolateral Transcytosis of Green Fluorescent Protein-66 kHC in MDCK Cells

[0460] Transcytosis of green fluorescent protein-66 kHC was assayed in Madin-Darby Canine Kidney (“MDCK”) cell cultures using a TRANSWELL® apparatus assay system. Assay was initiated by addition of 1×10⁻⁸ molar GFP-66 kHC to the upper chamber. Cultures were subsequently incubated for eighteen hours at 37° C. At the end of each experiment, contents of the basal chamber were collected and analyzed by fluorescence spectrometry. The relative amount of transcytosis was demonstrated based upon the emission peak of the GFP-66 kHC conjugate.

[0461] The results show that 66 kHC did not efficiently transport GFP from the apical to the basolateral side of cells. Purified 66 kHC fragment did not efficiently transport the GFP in MDCK cell cultures. 66 kHC is poorly bound, internalized, transcytosed, and released by differentiated, polarized canine kidney epithelial cells.

### Example 31

### Apical to Basolateral Transcytosis of S-TAG™-50 kHC in T-84 Cells

[0462] Transcytosis of S-TAG™ 50 kHC, serotype A, was assayed in human gut epithelial (“T-84”) cell cultures using a TRANSWELL® apparatus assay system. Assay was initiated by addition of 1×10⁻⁸ molar S-TAG™-50 kHC to the upper chamber. Cultures were subsequently incubated for eighteen hours at 37° C. At the end of each experiment, contents of three basal chambers per condition were collected and concentrated in a CENTRICON™ micro-concentrator. The resulting solution was run on 7.5% (w/v) SDS-PAGE and subsequently transferred to nitrocellulose membranes. The identity and molecular weight of the transcytosed molecule was confirmed by Western blotting with anti-HC antibody.

[0463] The results verify that the S-TAG™-50 kHC was transported from the apical to the basolateral side of cells. Not only did S-TAG™-50 kHC efficiently cross T-84 cells, but the molecular weight of the molecule was unaltered.

[0464] There are six conclusions that may be drawn. First, S-TAG™-50 kHC is bound, internalized, transcytosed, and released by differentiated, polarized human gut epithelial cells. Second, modification of 50 kHC by addition of S-TAG™ does not alter the ability of 50 kHC to exhibit these properties. Third, 50 kHC is capable of transporting S-TAG™ from the apical to the basolateral side of human gut epithelial cells. Fourth, the transported S-TAG™ molecule retains its antibody binding properties. Fifth, 50 kHC is capable of transporting a 6×-histidine tag from the apical to the basolateral side of human gut epithelial cells. Sixth, 50 kHC is capable of transporting more than one molecule (polyhistidine tag and S-TAG™) at a time across human gut epithelial cells.

### Example 32

### Apical to Basolateral Transcytosis of an S-TAG™-50 kHC in MDCK Cells

[0465] Transcytosis of S-TAG™-50 kHC, serotype A, was assayed in Madin-Darby Canine Kidney (“MDCK”) cell cultures using a TRANSWELL® apparatus assay system. Assay was initiated by addition of 1×10⁻⁸ molar S-TAG™-50 kHC to the upper chamber. Cultures were subsequently incubated for eighteen hours at 37° C. At the end of each experiment, contents of three basal chambers per condition were collected and concentrated in a CENTRICON™ micro-concentrator. The resulting solution was run on 7.5% (w/v) SDS-PAGE and subsequently transferred to nitrocellulose membranes. The identity and molecular weight of the transcytosed molecule was confirmed by Western blotting with anti-HC antibody.

[0466] The results show that S-TAG™-50 kHC was not detected in medium collected from the basolateral side of cells. Thus, the S-TAG™-50 kHC did not efficiently cross MDCK cells. The S-TAG™-50 kHC is poorly bound, internalized, transcytosed, and released by polarized MDCK cells.

### Example 33

### Apical to Basolateral Transcytosis of Glutathione-S-Transferase (GST)-88 kHC Conjugate in T-84 Cells

[0467] Transcytosis of GST-88 kHC, serotype A, was assayed in human gut epithelial (“T-84”) cell cultures using a TRANSWELL® apparatus assay system. Assay was initiated by addition of 1×10⁻⁸ molar GST-88 kHC to the upper chamber. Cultures were subsequently incubated for eighteen hours at 37° C. At the end of each experiment, contents of three basal chambers per condition were collected and concentrated in a CENTRICON™ micro-concentrator. The resulting solution was run on 7.5% (w/v) SDS-PAGE and subsequently transferred to nitrocellulose membranes. The identity and molecular weight of the transcytosed molecule was confirmed by Western blotting with anti-HC antibody and by probing a duplicate blot with anti-GST antibody.

[0468] The results verify that the GST-88 kHC was transported from the apical to the basolateral side of cells. Not only did the GST-88 kHC efficiently cross T-84 cells, but the molecular weight of the molecule was unaltered.

[0469] There are six major conclusions that stem from the experimental results. The GST-88 kHC is bound, internalized, transcytosed, and released by differentiated, polarized human gut epithelial cells. Second, modification of 88 kHC by addition of GST does not alter the ability of 88 kHC to display these properties. Third, 99kHC is capable of transporting GST from the apical to the basolateral side of human gut epithelial cells. Fourth, the transported GST molecule retains its enzymatic properties. Fifth, 88 kHC is capable of transporting a 6×-histidine tag from the apical to the basolateral side of human gut epithelial cells. Sixth, 88 kHC is capable of transporting more than one molecule (polyhistidine tag and GST) at a time across human gut epithelial cells.

### Example 34

### Apical to Basolateral Transcytosis of GST-88 kHC in MDCK Cells

[0470] Transcytosis of GST-88 kHC, serotype A, was assayed in MDCK cell cultures using a TRANSWELL® apparatus assay system. Assay was initiated by addition of 1×10⁻⁸ molar GST-88 kHC to the upper chamber. Cultures were subsequently incubated for eighteen hours at 37° C. At the end of each experiment, contents of three basal chambers per condition were collected and concentrated in a CENTRICON™ micro-concentrator. The resulting solution was run on 7.5% (w/v) SDS-PAGE and subsequently transferred to nitrocellulose membranes. The identity and molecular weight of the transcytosed molecule was confirmed by Western blotting with anti-HC antibody and by probing a duplicate blot with anti-GST antibody. The results demonstrate that the GST-88 kHC was not efficiently transported from the apical to the basolateral side of cells.

### Example 35

### Apical to Basolateral Transcytosis of GST-66 kHC in T-84 Cells

[0471] Transcytosis of GST-66 kHC, serotype A, was assayed in human gut epithelial (“T-84”) cell cultures using a TRANSWELL® apparatus assay system. Assay was initiated by addition of 1×10⁻⁸ molar GST-66 kHC to the upper chamber. Cultures were subsequently incubated for eighteen hours at 37° C. At the end of each experiment, contents of three basal chambers per condition were collected and concentrated in a CENTRICON™ micro-concentrator. The resulting solution was run on 7.5% (w/v) SDS-PAGE and subsequently transferred to nitrocellulose membranes. The identity and molecular weight of the transcytosed molecule was confirmed by Western blotting with anti-HC antibody and by probing a duplicate blot with anti-GST antibody.

[0472] The results verify that GST-66 kHC was transported from the apical to the basolateral side of cells. Not only did GST-66 kHC efficiently cross T-84 cells, but the molecular weight of the molecule was unaltered.

[0473] There are six conclusions that may be drawn from the experimental results. First, GST-66 kHC is bound, internalized, transcytosed, and released by differentiated, polarized human gut epithelial cells. Second, modification of the 66 kHC by addition of GST does not alter the ability of 66 kHC to display these properties. Third, 66 kHC is capable of transporting GST from the apical to the basolateral side of human gut epithelial cells. Fourth, the transported GST molecule retains its enzymatic properties. Fifth, 66 kHC is capable of transporting a 6×-histidine tag from the apical to the basolateral side of human gut epithelial cells. Sixth, 66 kHC is capable of transporting more than one molecule (polyhistidine tag and GST) at a time across human gut epithelial cells.

### Example 36

### Apical to Basolateral Transcytosis of GST-66 kHC in MDCK Cells

[0474] Transcytosis of GST-66 kHC, serotype A, was assayed in MDCK cell cultures using a TRANSWELL® apparatus assay system. Assay was initiated by addition of 1×10⁻⁸ molar GST-66 kHC to the upper chamber. Cultures were subsequently incubated for eighteen hours at 37° C. At the end of each experiment, contents of three basal chambers per condition were collected and concentrated in a CENTRICON™ micro-concentrator. The resulting solution was run on 7.5% (w/v) SDS-PAGE and subsequently transferred to nitrocellulose membranes. The identity and molecular weight of the transcytosed molecule was confirmed by Western blotting with anti-HC antibody and by probing a duplicate blot with anti-GST antibody.

[0475] The results demonstrate that GST-66 kHC was not efficiently transported from the apical to the basolateral side of cells. Purified GST-66 kHC did not efficiently cross MDCK cultures. The GST-66 kHC is poorly bound, internalized, transcytosed, and released by polarized canine kidney epithelial cells.

### Example 37

### Apical to Basolateral Transcytosis of BoNT A by Calu-3 Cells

[0476] Transcytosis was assayed in Calu-3 cell cultures using a TRANSWELL® apparatus assay system. Assay was initiated by addition of 1×10⁻⁸ molar (¹²⁵I)-BoNT A to the upper chamber. Cultures were subsequently incubated for eighteen hours at 37° C. At each time point, the experimental contents of the basal chamber were collected and gel filtered. Void volume fractions were assayed for radioactivity and the toxin peak was summed to determine total counts. The amount of transcytosis was calculated based on the specific activity of labeled toxin.

[0477] The results show that BoNT A was transported from the apical to the basolateral side of cells. Purified neurotoxin efficiently crossed Calu-3 cells, and the rate of transcytosis was quantified at 0.423±0.076 femtomoles per hour per square centimeter.

[0478] There are five major conclusions that stem from the experimental results. First, the purified botulinum neurotoxin is bound, internalized, transcytosed, and released by differentiated, polarized human alveolar epithelial cells. Second, modification of lysine residues does not alter the ability of the holotoxin to display these properties. Third, the holotoxin is capable of transporting the ¹²⁵I-Bolton-Hunter reagent from the apical to the basolateral side of human alveolar epithelial cells. Fourth, the HC is capable of transporting the LC from the apical to the basolateral side of human alveolar epithelial cells. Fifth, the HC is capable of transporting more than one molecule (LC & Bolton-Hunter reagent) at a time across human alveolar epithelial cells.

### Example 38

### Basolateral to Apical Transcytosis of BoNT A by Calu-3 Cells

[0479] Transcytosis was assayed in Calu-3 cell cultures using a TRANSWELL® apparatus assay system. Assay was initiated by addition of 1×10⁻⁸ molar (¹²⁵I)-BoNT A to the lower chamber. Cultures were subsequently incubated for eighteen hours at 37° C. At each time point, the experimental contents of the upper chamber were collected and gel filtered. Void volume fractions were assayed for radioactivity and the toxin peak was summed to determine total counts. The amount of transcytosis was calculated based on the specific activity of labeled BoNT A.

[0480] The results show that BoNT A was transported from the basolateral to the apical side of cells. Purified neurotoxin efficiently crossed Calu-3 cells, and the rate of transcytosis was quantified at 0.206±0.037 femtomoles per hour per square centimeter.

[0481] There are five major conclusions that stem from the experimental results. First, the purified botulinum neurotoxin is bound, internalized, transcytosed, and released by differentiated, polarized human alveolar epithelial cells. This process is somewhat less efficient in the basolateral to apical direction than in the reverse direction. Second, modification of lysine residues does not alter the ability of the holotoxin to display these properties. Third, the holotoxin is capable of transporting the ¹²⁵I-Bolton-Hunter reagent from the basolateral to the apical side of human gut epithelial cells. Fourth, the HC is capable of transporting the LC from the basolateral to the apical side of human gut epithelial cells. Fifth, the HC is capable of transporting more than one molecule (LC & Bolton-Hunter reagent) at a time across human alveolar epithelial cells.

### Example 39

### Apical to Basolateral Transcytosis of A HC by Calu-3 cells

[0482] Transcytosis was assayed in Calu-3 cell cultures using a TRANSWELL® apparatus assay system. Assay was initiated by addition of 1×10⁻⁸ molar (¹²⁵I)-HC (serotype A) to the upper chamber. Cultures were subsequently incubated for eighteen hours at 37° C. At each time point, the experimental contents of the basal chamber were collected and gel filtered. Void volume fractions were assayed for radioactivity and the toxin peak was summed to determine total counts. The amount of transcytosis was calculated based on the specific activity of labeled HC.

[0483] The results show that HC was transported from the apical to the basolateral side of cells. Not only did HC efficiently cross Calu-3 cells, but the rate of transcytosis (0.198±0.007 femtomoles per hour per square centimeter) was comparable to the rate of transcytosis (0.423 femtomoles per hour per square centimeter) for purified holotoxin.

[0484] There are three major conclusions that may be drawn. First, the HC fragment of botulinum neurotoxin is bound, internalized, transcytosed, and released by differentiated, polarized human alveolar epithelial cells. Second, modification of lysine residues does not alter the ability of the HC to display these properties. Third, the HC is capable of transporting the ¹²⁵I-Bolton-Hunter reagent from the apical to the basolateral side of human alveolar epithelial cells.

### Example 40

### Basolateral to Apical Transcytosis of HC by Calu-3 cells

[0485] Transcytosis was assayed in Calu-3 cell cultures using a TRANSWELL® apparatus assay system. Assay was initiated by addition of 1×10⁻⁸ molar (¹²⁵I)-HC (serotype A) to the lower chamber. Cultures were subsequently incubated for eighteen hours at 37° C. At each time point, the experimental contents of the upper chamber were collected and gel filtered. Void volume fractions were assayed for radioactivity and the toxin peak was summed to determine total counts. The amount of transcytosis was calculated based on the specific activity of labeled HC.

[0486] The results show that HC was transported from the basolateral to the apical side of cells. Not only did HC efficiently cross Calu-3 cells, but the rate of transcytosis (0.112±0.033 femtomoles per hour per square centimeter) was comparable to the rate of transcytosis (0.206 femtomoles per hour per square centimeter) for purified holotoxin.

[0487] There are three major conclusions that may be drawn. First, the HC fragment of botulinum neurotoxin is bound, internalized, transcytosed, and released by differentiated, polarized human alveolar epithelial cells. This phenomenon operates in both the apical to basolateral and basolateral to apical directions, although the former is more efficient. Second, modification of lysine residues does not alter the ability of the HC to display these properties. Third, the HC is capable of transporting the ¹²⁵I-Bolton-Hunter reagent from the basolateral to the apical side of human alveolar epithelial cells.

### Example 41

### Apical to Basolateral Transcytosis of BoNT A by Rat Alveolar Epithelial Cells

[0488] Transcytosis was assayed in rat alveolar epithelial cells (RAEC) cultures using a TRANSWELL® apparatus assay system. Assay was initiated by addition of 1×10⁻⁸ molar (¹²⁵I-BoNT A to the upper chamber. Cultures were subsequently incubated for eighteen hours at 37° C. At each time point, the experimental contents of the basal chamber were collected and gel filtered. Void volume fractions were assayed for radioactivity and the toxin peak was summed to determine total counts. The amount of transcytosis was calculated based on the specific activity of labeled BoNT A.

[0489] The results show that BoNT A was transported from the apical to the basolateral side of cells. Purified neurotoxin efficiently crossed rat alveolar epithelial cells, and the rate of transcytosis was quantified at 0.376±0.014 femtomoles per hour per square centimeter.

[0490] There are five major conclusions that stem from the experimental results. First, the purified botulinum neurotoxin is bound, internalized, transcytosed, and released by differentiated, polarized rat alveolar epithelial cells. Second, modification of lysine residues does not alter the ability of the holotoxin to display these properties. Third, the holotoxin is capable of transporting the ¹²⁵I-Bolton-Hunter reagent from the apical to the basolateral side of rat alveolar epithelial cells. Fourth, the HC is capable of transporting the LC from the apical to the basolateral side of rat alveolar epithelial cells. Fifth, the HC is capable of transporting more than one molecule (LC & Bolton-Hunter reagent) at a time across rat alveolar epithelial cells.

### Example 42

### Basolateral to Apical Transcytosis of BoNT A by RAEC

[0491] Transcytosis was assayed in rat alveolar epithelial cell cultures using a TRANSWELL® apparatus assay system. Assay was initiated by addition of 1×10⁻⁸ molar (¹²⁵I)-BoNT A to the lower chamber. Cultures were subsequently incubated for eighteen hours at 37° C. At each time point, the experimental contents of the upper chamber were collected and gel filtered. Void volume fractions were assayed for radioactivity and the toxin peak was summed to determine total counts. The amount of transcytosis was calculated based on the specific activity of labeled BoNT A.

[0492] The results show that BoNT A was transported from the basolateral to the apical side of cells. Purified neurotoxin efficiently crossed rat alveolar epithelial cells, and the rate of transcytosis was quantified at 0.159±0.027 femtomoles per hour per square centimeter.

[0493] There are five major conclusions that stem from the experimental results. First, the purified botulinum neurotoxin is bound, internalized, transcytosed, and released by differentiated, polarized rat alveolar epithelial cells. This phenomenon operates in both the apical to basolateral and basolateral to apical directions, although the former is more efficient. Second, modification of lysine residues does not alter the ability of the holotoxin to display these properties. Third, the holotoxin is capable of transporting the ¹²⁵I-Bolton-Hunter reagent from the basolateral to the apical side of rat alveolar epithelial cells. Fourth, the HC is capable of transporting the LC from the basolateral to the apical side of rat alveolar epithelial cells. Fifth, the HC is capable of transporting more than one molecule (LC & Bolton-Hunter reagent) at a time across rat alveolar epithelial cells.

### Example 43

### Apical to Basolateral Transcytosis of HC by RAEC

[0494] Transcytosis was assayed in rat alveolar epithelial cells (RAEC) using a TRANSWELL® apparatus assay system. Assay was initiated by addition of 1×10⁻⁸ molar (¹²⁵I)-HC (serotype A) to the upper chamber. Cultures were subsequently incubated for 18 hours at 37° C. At each time point, the experimental contents of the basal chamber were collected and gel filtered. Void volume fractions were assayed for radioactivity and the toxin peak was summed to determine total counts. The amount of transcytosis was calculated based on the specific activity of labeled HC.

[0495] The results show that HC was transported from the apical to the basolateral side of cells. Not only did HC efficiently cross rat alveolar epithelial cells, but the rate of transcytosis (0.140±0.050 femtomoles per hour per square centimeter) was comparable to the rate of transcytosis (0.376 femtomoles per hour per square centimeter) for botulinum neurotoxin type A.

[0496] There are three major conclusions that may be drawn. First, the HC fragment of botulinum neurotoxin is bound, internalized, transcytosed, and released by differentiated, polarized rat alveolar epithelial cells. Second, modification of lysine residues does not alter the ability of the HC to display these properties. Third, the HC is capable of transporting the ¹²⁵I-Bolton-Hunter reagent from the apical to the basolateral side of human alveolar epithelial cells.

### Example 44

### Basolateral to Apical Transcytosis of HC by RAEC

[0497] Transcytosis was assayed in rat alveolar epithelial cells using a TRANSWELL® apparatus assay system. Assay was initiated by addition of 1×10⁻⁸ molar (¹²⁵I)-HC (serotype A) to the lower chamber. Cultures were subsequently incubated for eighteen hours at 37° C. At each time point, the experimental contents of the upper chamber were collected and gel filtered. Void volume fractions were assayed for radioactivity and the toxin peak was summed to determine total counts. The amount of transcytosis was calculated based on the specific activity of labeled HC.

[0498] The results show that HC was transported from the basolateral to the apical side of cells. Not only did HC efficiently cross rat alveolar epithelial cells, but the rate of transcytosis (0.132±0.026 femtomoles per hour per square centimeter) was comparable to the rate of transcytosis (0.159 femtomoles per hour per square centimeter) for botulinum neurotoxin type A.

[0499] There are three major conclusions that may be drawn. First, the HC fragment of botulinum neurotoxin is bound, internalized, transcytosed, and released by differentiated, polarized rat alveolar epithelial cells. This phenomenon operates in both the apical to basolateral and Basolateral to apical directions, although the former is more efficient. Second, modification of lysine residues does not alter the ability of the HC to display these properties. Third, the HC is capable of transporting the ¹²⁵I-Bolton-Hunter reagent from the basolateral to the apical side of rat alveolar epithelial cells.

### Example 45

### Absorption of BoNT A from the Respiratory Tract of Mouse

[0500] This example demonstrated that botulinum toxin contains all information necessary to bind receptors on the apical surface of epithelial cells, to be internalized, to be transcytosed, and to be released on the basolateral side of epithelial cells in living animals. These experiments were done with homogeneous BoNT and with Swiss-Webster female mice (25 to 30 grams body weight).

[0501] BoNT A was administered by the intranasal route. After mice were lightly anesthetized with isoflurane (ISO-THESIA™, Abbott Laboratories North, Chicago, Ill.), 36.4 micrograms per kilogram weight (¹²⁵I)-BoNT A was administered by a single application of a 20 microliter solution to the nares. The heads of animals were maintained in an upright position to minimize drainage into the posterior pharynx. Individual groups were sacrificed at 1, 2, or 3 hours with CO₂, and blood was collected by cardiac puncture. Plasma was separated from blood by centrifugation at 3000×g for 10 minutes and then stored at −20° C. until assay. Plasma samples (100 microliters) were subsequently mixed with PBS (400 microliters) and filtered through a SEPHADEX™ G-25 column. Fractions (0.5 milliliter) were collected, and the amount of radioactivity in the fractions was measured in a gamma-counter. Labeled BoNT A eluted at void volume, and the radioactivity contained in the void volume fractions was summed to determine the total amount of protein present.

[0502] The results shown in FIG. 23 indicate that the botulinum toxin was absorbed from the respiratory tract. The timepoint for maximum protein concentration in blood was approximately two hours, and there was rapid clearance after attainment of the peak values.

[0503] There are five major conclusions that stem from the experimental results. First, the purified botulinum neurotoxin is bound, internalized, transcytosed, and released by respiratory tract epithelial cells in vivo. Second, modification of lysine residues does not alter the ability of the holotoxin to display these properties. Third, the holotoxin is capable of transporting the ¹²⁵I-Bolton-Hunter reagent from the apical to the basolateral side of mouse respiratory epithelial cells in vivo. Fourth, the HC is capable of transporting the LC from the apical to the basolateral side of mouse respiratory epithelial cells in vivo. Fifth, the HC is capable of transporting more than one molecule (LC & Bolton-Hunter reagent) at a time across mouse respiratory epithelial cells in vivo.

### Example 46

### Absorption of native HC from the Respiratory Tract of Mouse

[0504] This example demonstrated that HC (serotype A) contains all information necessary to bind receptors on the apical surface of epithelial cells, to be internalized, to be transcytosed, and to be released on the basolateral side of epithelial cells in living animals. These experiments were done with homogeneously isolated HC of BoNT and with Swiss-Webster female mice (25 to 30 grams body weight).

[0505] HC was administered by the intranasal route. After mice were lightly anesthetized with isoflurane (ISO-THESIA™, Abbott Laboratories North, Chicago, Ill., U.S.A.), 24.4 micrograms per kilogram body weight (¹²⁵I)-HC was administered by a single application of a 20 microliter solution to the nares. The heads of animals were maintained in an upright position to minimize drainage into the posterior pharynx. Individual groups were sacrificed at one, two, four or six hours with CO₂, and blood was collected by cardiac puncture. Plasma was separated from blood by centrifugation at 3000×g for 10 minutes and then stored at −20° C. until assay. Plasma samples (100 microliters) were subsequently mixed with PBS (400 microliters) and filtered through a SEPHADEX™ G-25 column. Fractions (0.5 milliliter) were collected, and the amount of radioactivity in the fractions was measured in a gamma-counter. Labeled HC eluted at void volume, and the radioactivity contained in the void volume fractions was summed to determine the total amount of HC present.

[0506] Animals that received HC were monitored for 6 hours. The results shown in FIG. 24 indicate that HC was absorbed from the respiratory tract. The timepoint for maximum protein concentration in blood was approximately two hours, and there was rapid clearance after attainment of the peak values.

[0507] There are three major conclusions that may be drawn. First, the HC fragment of botulinum neurotoxin is bound, internalized, transcytosed, and released by respiratory tract epithelial cells in vivo. Second, modification of lysine residues does not alter the ability of the HC to display these properties. Third, the HC is capable of transporting the ¹²⁵I-Bolton-Hunter reagent from the apical to the basolateral side of mouse respiratory epithelial cells in vivo.

### Example 47

### Absorption of recombinant 50 kHC from the Respiratory Tract of Mouse

[0508] This example demonstrated that 50 kHC contains all information necessary to bind receptors on the apical surface of epithelial cells, to be internalized, to be transcytosed, and to be released on the basolateral side of epithelial cells in living animals. These experiments were done with purified recombinant 50 kHC fused with a 6× His tag and with Swiss-Webster female mice (body weight of 25 to 30 grams each).

[0509] 50 kHC was administered by the intranasal route. After mice were lightly anesthetized with isoflurane (ISO-THESIA™, Abbott Laboratories North, Chicago, Ill., U.S.A.), 0.4 milligrams of protein per kilogram body weight was administered by a single application of a 20 microliter solution to the nares. The heads of animals were maintained in an upright position to minimize drainage into the posterior pharynx. Individual groups were sacrificed at 0.5, 1, 2, or 4 hours with CO₂ and blood was collected by cardiac puncture. Plasma was separated from blood by centrifugation at 3000× g for 10 minutes and then stored at −20° C. until assay. Plasma level of the HC fragment was determined by capture ELISA.

[0510] Animals that received 50 kHC were monitored for four hours. The results shown in FIG. 25 that 50 kHC was absorbed from the respiratory tract. The timepoint for maximum protein concentration in blood was approximately one hour, and there was rapid clearance after attainment of peak values.

[0511] There are two major conclusions that stem from the experimental results. First, the 50 kHC fragment of botulinum neurotoxin is bound, internalized, transcytosed, and released by mouse respiratory tract epithelial cells in vivo. Second, 50 kHC is capable of transporting a 6×-histidine tag from the apical to the basolateral side of mouse respiratory tract epithelial cells in vivo.

### Example 48

### Absorption of GST-50 kHC from the Respiratory Tract of Mouse

[0512] This example demonstrated that 50 kHC contains all information necessary to bind receptors on the apical surface of epithelial cells, to be internalized, to be transcytosed, and to be released on the basolateral side of epithelial cells in living animals. In addition, 50 kHC can transport GST across epithelial cells. These experiments were done with purified recombinant GST-50 kHC and Swiss-Webster female mice (body weight of 25 to 30 grams each).

[0513] GST-50 kHC fusion protein was administered by the intranasal route. After mice were lightly anesthetized with isoflurane (ISO-THESIA™, Abbott Laboratories North, Chicago, Ill., U.S.A.), 0.6 micrograms per kilogram body weight protein was administered by a single application of a 20 microliter solution to the nares. The heads of animals were maintained in an upright position to minimize drainage into the posterior pharynx. Individual groups were sacrificed at one, two, four or six hours with CO₂, and blood was collected by cardiac puncture. Plasma was separated from blood by centrifugation at 3000× g for 10 minutes and then stored at −20° C. until assay. Plasma level of GST-50 kHC was determined by capture ELISA.

[0514] Animals that received GST-50 kHC were monitored for six hours. The results shown in FIG. 26 indicate that GST-50 kHC was absorbed from the respiratory tract. The timepoint for maximum protein concentration in blood was approximately two hours, and there was rapid clearance after attainment of the peak values.

[0515] There are four major conclusions that may be drawn from the experimental results. First, the GST-50 kHC is bound, internalized, transcytosed, and released by mouse respiratory tract epithelial cells in vivo. Second, 50 kHC is capable of transporting GST from the apical to the basolateral side of mouse respiratory tract epithelial cells in vivo. Third, 50 kHC is capable of transporting a 6×-histidine tag from the apical to the basolateral side of mouse respiratory tract epithelial cells in vivo. Fourth, 50 kHC is capable of transporting more than one molecule (GST & 6×-histidine tag) at a time across mouse respiratory epithelial cells in vivo.

### Example 49

### Intranasal Immunization of Mice with GST-50 kHC

[0516] This example demonstrated that 50 kHC contains all information necessary to bind receptors on the apical surface of epithelial cells, to be internalized, to be transcytosed, and to be released on the Basolateral side of epithelial cells in living animals. In addition, 50 kHC can transport a heterologous molecule in the correct conformation to evoke an immune response. These experiments were done with purified recombinant GST-50 kHC and Swiss-Webster female mice (body weight of 25-30 grams each).

[0517] For intranasal immunization, mice received 0.6 milligrams of GST-50 kHC per kilogram body weight in 20 microliters of PBS. Mice were lightly anesthetized with isoflurane (ISO-THESIA™, Abbott Laboratories North, Chicago, Ill., U.S.A.). Protein was administered by a single application of a 20 microliter solution to the nares. The heads of animals were maintained in an upright position to minimize drainage into the posterior pharynx. Five doses were given at seven day intervals. The mice were bled 10 days after the fifth immunization, and the specimens were analyzed by immunoblotting for immunoreactivity to GST, 50 kHC, and GST-50 kHC.

[0518] Animals that are immunized with GST-50 kHC were monitored for the presence of specific antibodies. The results shown in the Western blot of immunized mouse serum of FIG. 27 show that these animals developed antibodies against both GST and BoNT A HC following intranasal immunization with GST-50 kHC. These results indicate that 50 kHC carries GST molecule from the respiratory tract to the blood stream in vivo, and that specific immune responses to GST and 50 kHC were evoked by intranasal immunization.

[0519] There are five major conclusions that may be drawn from the experimental results. First, the GST-50 kHC is bound, internalized, transcytosed, and released by mouse respiratory tract epithelial cells in vivo. Second, 50 kHC is capable of transporting GST from the apical to the basolateral side of mouse respiratory tract epithelial cells in vivo. Third, the 50 kHC is capable of transporting a 6×-histidine tag from the apical to the basolateral side of mouse respiratory tract epithelial cells in vivo. Fourth, the 50 kHC is capable of transporting more than one molecule (GST & 6×-histidine tag) at a time across mouse respiratory epithelial cells in vivo. Fifth, transcytosed GST-50 kHC is capable of evoking specific immune response to GST and 50 kHC in vivo.

### Example 50

### Intranasal Immunization of Mice With BoNT A 48 kilodalton HC Portion

[0520] This example demonstrates that a two kilodalton segment of the HC carboxyterminus contains information necessary to bind receptors on the apical surface of epithelial cells, to be internalized, to be transcytosed, and to be released on the basolateral side of the epithelial cells in living animals. To demonstrate this, a 48 kilodalton portion of the HC was generated by deleting a 2 kilodalton fragment of carboxyterminus end of 50 kHC with trypsin digestion.

[0521] The experiment was carried out using purified recombinant 48 kHC and Swiss-Webster female mice (25 to 30 gram body weight).

[0522] For intranasal immunization, mice received 0.4 mg/kg of 48 kHC in a 10 μl of PBS. Mice were lightly anesthetized with isoflurane (ISO-THESIA™, Abbott Laboratories North, Chicago, Ill., U.S.A.). Protein was administered by a single application of 10 μl solution to the nares. The heads of animals were maintained in an upright position to minimize drainage into the posterior pharynx. Three doses were given at two week intervals. The mice were bled seven days after the third immunization, and the specimens were analyzed by ELISA for immunoreactivity to botulinum toxin A. The mice were also challenged with a lethal dose of botulinum toxin A (1 μg/mouse) ten days after the third immunization, and the survival rate was observed for two weeks.

[0523] All the animals died within twenty four hours after the lethal challenge of botulinum toxin (i.e., there was little protection). In addition, there was only a low level of serum IgG to the antigen. The results show that the deleted 2 kilodalton fragment of the carboxyterminus end of the HC has an important function in binding, internalization, transcytosis, and release by mouse respiratory epithelial cells in vivo.

### Example 51

### Intranasal Immunization of Mice with 50 kHC and Cholera Toxin B Subunit

[0524] This example demonstrates that cholera toxin B subunit (CTB) induces systemic immune response against BoNT as well as mucosal immune response when coadministered with 50 kHC by intranasal route. These experiments were done with purified recombinant 50 kHC, cholera toxin B subunit (sigma) and Swiss-Webster female mice (body weight of 25-30 grams each).

[0525] Mice received 0.1 milligrams of CTB per kilogram body weight in 10 microliters of PBS, 40 micrograms of 50 kHC per kilogram body weight in 10 microliters of PBS, or 50 kHC and CTB by intranasal route. Mice were lightly anesthetized with isoflurane (ISO-THESIA™, Abbott Laboratories North, Chicago, Ill., U.S.A.). Protein was administered by a single application of 10 microliters of solution to the nares. The heads of animals were maintained in an upright position to minimize drainage into the posterior pharynx. Three doses were given at two week intervals. The mice were bled seven days after the third immunization, and the specimens were analyzed by ELISA for immunoreactivity to botulinum toxin A. The mice were also challenged with lethal dose of botulinum toxin A (1 μg/mouse) ten days after the third immunization, and the survival rate of observed for two weeks.

[0526] The animals immunized with CTB were dead within 2 hours after the lethal challenge of botulinum toxin. The animals immunized with low dose of 50 kHC showed 40% of protection against the BoNT A challenge and moderate level of serum Ig response (FIG. 28). The animals immunized with 50 kHC and CTB developed significant high level of serum Ig response as well as mucosal IgG response, and all the animals were protected against the lethal challenge of BoNT A.

[0527] These results showed that intranasal administration of 50 kHC does not induce a mucosal immune response even at the high dose of 0.4 milligram per kilogram, although it induces a modest level of serum Ig response and protects only 40% of animals against the lethal challenge of BoNT A. However, mucosal IgG response can be induced by co-administration with CTB, which leads to complete protection against a multilethal dose of toxin (1 μg/mouse).

### Example 52

### Oral Immunization of Mice with Purified Serotype A HC (100 kDa HC)

[0528] This example demonstrates that 100 kDa HC contains all the information necessary to bind receptors on the apical surface of intestinal cells, to be internalized, to be transcytosed, and to be released on the basolateral side of epithelial cells in living animals. These experiments were performed using HC purified from native botulinum neurotoxin serotype A, administered by gavage to Swiss-Webster female mice (body weight 25-30 grams).

[0529] For oral immunization, mice received 10 micrograms of 100 kDa HC per mouse in a 200 microliters of PBS. HC in 200 microliters of PBS was administered to each mouse using a feeding needle. An initial dose, was followed by three boosters at two week intervals. Mice were anesthethized with isoflurane (ISO-THESIA™, Abbott Laboratories, Chicago, Ill., U.S.A.), and bled from the retroorbital sinus seven days after each booster. Antibody production was assayed by ELISA and titers were calculated.

[0530] Antibody titers subsequent to each booster are illustrated in FIG. 29. The results demonstrate that mice immunized orally with 100 kDa HC developed antibodies to toxin HC. The results indicate that 100 kDa HC was absorbed from the gastrointestinal system to the circulation in vivo, and that a specific immune response was evoked by oral immunization with 100 kDa HC. Furthermore, the results show that purified 100 kDa HC is an oral vaccine against botulinum neurotoxin.

### Example 53

### Transport of Various Molecules of Differing Molecular Sizes and Differing Molecular Functions across Epithelial Cells In Vitro and In Vivo

[0531] This example demonstrates that the HC of botulinum toxin, as well as fragments of the HC, have a very broad capacity to transport molecules across epithelial cells. This means that the transport molecule (i.e., the HC or fragments of the HC) can carry a wide array of cargo molecules (ligands, enzymes, antigens, etc.) into the general circulation by binding to the surface of epithelial cells, undergoing endocytosis and transcytosis, and then release into blood and lymph.

[0532] In vitro experiments and in vivo experiments were performed as described in Examples 1 to 52. The results of these experiments demonstrate that the HC or its fragments can transport molecules of widely differing molecular weights, as shown in Table 2, below, and widely differing functions, as shown in Table 2, below, across epithelial cells.

TABLE 2
Molecules of varying sizes

| Molecule | Size (kilodaltons) |
|---|---|
| biotin | 244 |
| Bolton-Hunter Reagent (¹²⁵I) | 387 |
| Alexa 568 | 792 |
| 6 × histidine tag | 840 |
| S-Tag | 1,748 |
| glutathione-S-transferase | 26,000 |
| (GST) | |
| Green Fluorescent protein | 27,000 |
| (GFP) | |
| BoNT LC | 50,000 |

[0533] TABLE 3
Molecules of Differing Functions

| Molecule | Functional Properties |
|---|---|
| biotin | ligand binding |
| horseradish peroxidase | exhibits catalytic activity |
| Bolton-Hunter Reagent (¹²⁵I) | emits ionizing radiation |
| Alexa 568 | emits fluorescent signal |
| various antigens | evoke antibody response |
| BoNT LC | exhibits catalytic activity |

[0534] There are eight major conclusions that stem from the experimental results. First, the HC of botulinum toxin is bound, internalized, transcytosed and released by epithelial cells that form a boundary between the outside world and the general circulation. Second, fragments of the HC of botulinum toxin are bound, internalized, transcytosed and released by epithelial cells that form a boundary between the outside world and the general circulation. Third, the HC and its fragments, when modified to allow for attachment of individual molecules, continue to display all the properties needed to cross epithelial barriers. Fourth, the HC and its fragments can transport a variety of molecules individually across epithelial cells. Fifth, when modified to allow for attachment of more than one molecule, the HC and its fragments continue to display all the properties needed to cross epithelial cells. Sixth, the HC and its fragments can transport more than one molecule at a time across epithelial cells. Seventh, the HC and its fragments can transport molecules of differing molecular weights at the same time. Eighth, the HC and its fragments can transport molecules of differing functions at the same time.

[0535] It will be appreciated by those skilled in the art that changes could be made to the embodiments described above without departing from the broad inventive concept thereof. It is understood, therefore, that this invention is not limited to the particular embodiments disclosed, but it is intended to cover modifications within the spirit and scope of the present invention as defined by the appended claims.

The application's sequence listing, which the Patent Office published only in electronic form, follows.

SEQUENCE LISTING (188 sequences)

SEQ ID NO: 1 - protein, 1296 aa, Clostridium botulinum
MPFVNKQFNYKDPVNGVDIAYIKIPNAGQMQPVKAFKIHNKIWVIPERDTFTNPEEGDLNPPPEAKQVPVSYYDSTYLSTDNEKDNYLKGVTKLFERIYSTDLGRMLLTSIVRGIPFWGGSTIDTELKVIDTNCINVIQPDGSYRSEELNLVIIGPSADIIQFECKSFGHDVLNLTRNGYGSTQYIRFSPDFTFGFEESLEVDTNPLLGAGKFATDPAVTLAHELIHAEHRLYGIAINPNRVFKVNTNAYYEMSGLEVSFEELRTFGGHDAKFIDSLQENEFRLYYYNKFKDVASTLNKAKSIIGTTASLQYMKNVFKEKYLLSEDTSGKFSVDKLKFDKLYKMLTEIYTEDNFVNFFKVINRKTYLNFDKAVFRINIVPDENYTIKDGFNLKGANLSTNFNGQNTEINSRNFTRLKNFTGLFEFYKLLCVRGIIPFKTKSLDEGYNKALNDLCIKVNNWDLFFSPSEDNFTNDLDKVEEITADTNIEAAEENISLDLIQQYYLTFDFDNEPENISIENLSSDIIGQLEPMPNIERFPNGKKYELDKYTMFHYLRAQEFEHGDSRIILTNSAEEALLKPNVAYTFFSSKYVKKINKAVEAFMFLNWAEELVYDFTDETNEVTTMDKIADITIIVPYIGPALNIGNMLSKGEFVEAIIFTGVVAMLEFIPEYALPVFGTFAIVSYIANKVLTVQTINNALSKRNEKWDEVYKYTVTNWLAKVNTQIDLIREKMKKALENQAEATKAIINYQYNQYTEEEKNNINFNIDDLSSKLNESINSAMININKFLDQCSVSYLMNSMIPYAVKRLKDFDASVRDVLLKYIYDNRGTLVLQVDRLKDEVNNTLSADIPFQLSKYVDNKKLLSTFTEYIKNIVNTSILSIVYKKDDLIDLSRYGAKINIGDRVYYDSIDKNQIKLINLESSTIEVILKNAIVYNSMYENFSTSFWIKIPKYFSKINLNNEYTIINCIENNSGWKVSLNYGEIIWTLQDNKQNIQRVVFKYSQMVNISDYINRWIFVTITNNRLTKSKIYINGRLIDQKPISNLGNIHASNKIMFKLDGCRDPRRYIMIKYFNLFDKELNEKEIKDLYDSQSNSGILKDFWGNYLQYDKPYYMLNLFDPNKYVDVNNIGIRGYMYLKGPRGSVVTTNIYLNSTLYEGTKFIIKKYASGNEDNIVRNNDRVYINVVVKNKEYRLATNASQAGVEKILSALEIPDVGNLSQVVVMKSKDDQGIRNKCKMNLQDNNGNDIGFIGFHLYDNIAKLVASNWYNRQVGKASRTFGCSWEFIPVDDGWGESSL

SEQ ID NO: 2 - protein, 1291 aa, Clostridium botulinum
MPVTINNFNYNDPIDNNNIIMMEPPFARGTGRYYKAFKITDRIWIIPERYTFGYKPEDFNKSSGIFNRDVCEYYDPDYLNTNDKKNIFLQTMIKLFNRIKSKPLGEKLLEMIINGIPYLGDRRVPLEEFNTNIASVTVNKLISNPGEVERKKGIFANLIIFGPGPVLNENETIDIGIQNHFASREGFGGIMQMKFCPEYVSVFNNVQENKGASIFNRRGYFSDPALILMHELIHVLHGLYGIKVDDLPIVPNEKKFFMQSTDAIQAEELYTFGGQDPSIITPSTDKSIYDKVLQNFRGIVDRLNKVLVCISDPNININIYKNKFKDKYKFVEDSEGKYSIDVESFDKLYKSLMFGFTETNIAENYKIKTRASYFSDSLPPVKIKNLLDNEIYTIEEGFNISDKDMEKEYRGQNKAINKQAYEEISKEHLAVYKIQMCKSVKAPGICIDVDNEDLFFIADKNSFSDDLSKNERIEYNTQSNYIENDFPINELILDTDLISKIELPSENTESLTDFNVDVPVYEKQPAIKKIFTDENTIFQYLYSQTFPLDIRDISLTSSFDDALLFSNKVYSFFSMDYIKTANKVVEAGLFAGWVKQIVNDFVIEANKSNTMDKIADISLIVPYIGLALNVGNETAKGNFENAFEIAGASILLEFIPELLIPVVGAFLLESYIDNKNKIIKTIDNALTKRNEKWSDMYGLIVAQWLSTVNTQFYTIKEGMYKALNYQAQALEEIIKYRYNIYSEKEKSNINIDFNDINSKLNEGINQAIDNINNFINGCSVSYLMKKMIPLAVEKLLDFDNTLKKNLLNYIDENKLYLIGSAEYEKSKVNKYLKTIMPFDLSIYTNDTILIEMFNKYNSEILNNIILNLRYKDNNLIDLSGYGAKVEVYDGVELNDKNQFKLTSSANSKIRVTQNQNIIFNSVFLDFSVSFWIRIPKYKNDGIQNYIHNEYTIINCMKNNSGWKISIRGNRIIWTLIDINGKTKSVFFEYNIREDISEYINRWFFVTITNNLNNAKIYINGKLESNTDIKDIREVIANGEIIFKLDGDIDRTQFIWMKYFSIFNTELSQSNIEERYKIQSYSEYLKDFWGNPLMYNKEYYMFNAGNKNSYIKLKKDSPVGEILTRSKYNQNSKYINYRDLYIGEKFIIRRKSNSQSINDDIVRKEDYIYLDFFNLNQEWRVYTYKYFKKEEEKLFLAPISDSDEFYNTIQIKEYDEQPTYSCQLLFKKDEESTDEIGLIGIHRFYESGIVFEEYKDYFCISKWYLKEVKRKPYNLKLGCNWQFIPKDEGWTE

SEQ ID NO: 3 - protein, 1291 aa, Clostridium botulinum
MPITINNFNYSDPVDNKNILYLDTHLNTLANEPEKAFRITGNIWVIPDRFSRNSNPNLNKPPRVTSPKSGYYDPNYLSTDSDKDPFLKEIIKLFKRINSREIGEELIYRLSTDIPFPGNNNTPINTFDFDVDFNSVDVKTRQGNNWVKTGSINPSVIITGPRENIIDPETSTFKLTNNTFAAQEGFGALSIISISPRFMLTYSNATNDVGEGRFSKSEFCMDPILILMHELNHAMHNLYGIAIPNDQTISSVTSNIFYSQYNVKLEYAEIYAFGGPTIDLIPKSARKYFEEKALDYYRSIAKRLNSITTANPSSFNKYIGEYKQKLIRKYRFVVESSGEVTVNRNKFVELYNELTQIFTEFNYAKIYNVQNRKIYLSNVYTPVTANILDDNVYDIQNGFNIPKSNLNVLFMGQNLSRNPALRKVNPENMLYLFTKFCHKAIDGRSLYNKTLDCRELLVKNTDLPFIGDISDVKTDIFLRKDINEETEVIYYPDNVSVDQVILSKNTSEHGQLDLLYPSIDSESEILPGENQVFYDNRTQNVDYLNSYYYLESQKLSDNVEDFTFTRSIEEALDNSAKVYTYFPTLANKVNAGVQGGLFLMWANDVVEDFTTNILRKDTLDKISDVSAIIPYIGPALNISNSVRRGNFTEAFAVTGVTILLEAFPEFTIPALGAFVIYSKVQERNEIIKTIDNCLEQRIKRWKDSYEWMMGTWLSRIITQFNNISYQMYDSLNYQAGAIKAKIDLEYKKYSGSDKENIKSQVENLKNSLDVKISEAMNNINKFIRECSVTYLFKNMLPKVIDELNEFDRNTKAKLINLIDSHNIILVGEVDKLKAKVNNSFQNTIPFNIFSYTNNSLLKDIINEYFNNINDSKILSLQNRKNTLVDTSGYNAEVSEEGDVQLNPIFPFDFKLGSSGEDRGKVIVTQNENIVYNSMYESFSISFWIRINKWVSNLPGYTIIDSVKNNSGWSIGIISNFLVFTLKQNEDSEQSINFSYDISNNAPGYNKWFFVTVTNNMMGNMKIYINGKLIDTIKVKELTGINFSKTITFEINKIPDTGLITSDSDNINMWIRDFYIFAKELDGKDINILFNSLQYTNVVKDYWGNDLRYNKEYYMVNIDYLNRYMYANSRQIVFNTRRNNNDFNEGYKIIIKRIRGNTNDTRVRGGDILYFDMTINNKAYNLFMKNETMYADNHSTEDIYAIGLREQTKDINDNIIFQIQPMNNTYYYASQIFKSNFNGENISGICSIGTYRFRLGGDWYRHNYLVPTVKQGNYASLLESTSTHWGFVPVSE

SEQ ID NO: 4 - protein, 1276 aa, Clostridium botulinum
MTWPVKDFNYSDPVNDNDILYLRIPQNKLITTPVKAFMITQNIWVIPERFSSDTNPSLSKPPRPTSKYQSYYDPSYLSTDEQKDTFLKGIIKLFKRINERDIGKKLINYLVVGSPFMGDSSTPEDTFDFTRHTTNIAVEKFENGSWKVTNIITPSVLIFGPLPNILDYTASLTLQGQQSNPSFEGFGTLSILKVAPEFLLTFSDVTSNQSSAVLGKSIFCMDPVIALMHELTHSLHQLYGINIPSDKRIRPQVSEGFFSQDGPNVQFEELYTFGGLDVEIIPQIERSQLREKALGHYKDIAKRLNNINKTIPSSWISNIDKYKKIFSEKYNFDKDNTGNFVVNIDKFNSLYSDLTNVMSEVVYSSQYNVKNRTHYFSRHYLPVFANILDDNIYTIRDGFNLTNKGFNIENSGQNIERNPALQKLSSESVVDLFTKVCLRLTKNSRDDSTCIKVKNNRLPYVADKDSISQEIFENKIITDETNVQNYSDKFSLDESILDGQVPINPEIVDPLLPNVNMEPLNLPGEEIVFYDDITKYVDYLNSYYYLESQKLSNNVENITLTTSVEEALGYSNKIYTFLPSLAEKVNKGVQAGLFLNWANEVVEDFTTNIMKKDTLDKISDVSVIIPYIGPALNIGNSALRGNFNQAFATAGVAFLLEGFPEFTIPALGVFTFYSSIQEREKIIKTIENCLEQRVKRWKDSYQWMVSNWLSRITTQFNHINYQMYDSLSYQADAIKAKIDLEYKKYSGSDKENIKSQVENLKNSLDVKISEAMNNINKFIRECSVTYLFKNMLPKVIDELNKFDLRTKTELINLIDSHNIILVGEVDRLKAKVNESFENTMPFNIFSYTNNSLLKDIINEYFNSINDSKILSLQNKKNALVDTSGYNAEVRVGDNVQLNTIYTNDFKLSSSGDKIIVNLNNNILYSAIYENSSVSFWIKISKDLTNSHNEYTIINSIEQNSGWKLCIRNGNIEWILQDVNRKYKSLIFDYSESLSHTGYTNKWFFVTITNNIMGYMKLYINGELKQSQKIEDLDEVKLDKTIVFGIDENIDENQMLWIRDFNIFSKELSNEDINIVYEGQILRNVIKDYWGNPLKFDTEYYIINDNYIDRYIAPESNVLVLVQYPDRSKLYTGNPITIKSVSDKNPYSRILNGDNIILHMLYNSRKYMIIRDTDTIYATQGGECSQNCVYALKLQSNLGNYGIGIFSIKNIVSKNKYCSQIFSSFRENTMLLADIYKPWRFSFKNAYTPVAVTNYETKLLSTSSFWKFISRDPGWVE

SEQ ID NO: 5 - protein, 1251 aa, Clostridium botulinum
MPTINSFNYNDPVNNRTILYIKPGGCQQFYKSFNIMKNIWIIPERNVIGTIPQDFLPPTSLKNGDSSYYDPNYLQSDQEKDKFLKIVTKIFNRINDNLSGRILLEELSKANPYLGNDNTPDGDFIINDASAVPIQFSNGSQSILLPNVIIMGAEPDLFETNSSNISLRNNYMPSNHGFGSIAIVTFSPEYSFRFKDNSMNEFIQDPALTLMHELIHSLHGLYGAKGITTKYTITQKQNPLITNIRGTNIEEFLTFGGTDLNIITSAQSNDIYTNLLADYKKIASKLSKVQVSNPLLNPYKDVFEAKYGLDKDASGIYSVNINKFNDIFKKLYSFTEFDLATKFQVKCRQTYIGQYKYFKLSNLLNDSIYNISEGYNINNLKVNFRGQNANLNPRIITPITGRGLVKKIIRFCKNIVSVKGIRKSICIEINNGELFFVASENSYNDDNINTPKEIDDTVTSNNNYENDLDQVILNFNSESAPGLSDEKLNLTIQNDAYIPKYDSNGTSDIEQHDVNELNVFFYLDAQKVPEGENNVNLTSSIDTALLEQPKIYTFFSSEFINNVNKPVQAALFVGWIQQVLVDFTTEANQKSTVDKIADISIVVPYIGLALNIGNEAQKGNFKDALELLGAGILLEFEPELLIPTILVFTIKSFLGSSDNKNKVIKAINNALKERDEKWKEVYSFIVSNWMTKINTQFNKRKEQMYQALQNQVNALKAIIESKYNSYTLEEKNELTNKYDIEQIENELNQKVSIAMNNIDRFLTESSISYLMKLINEVKINKLREYDENVKTYLLDYIIKHGSILGESQQELNSMVIDTLNNSIPFKLSSYTDDKILISYFNKFFKRIKSSSVLNMRYKNDKYVDTSGYDSNININGDVYKYPTNKNQFGIYNDKLSEVNISQNDYIIYDNKYKNFSISFWVRIPNYDNKIVNVNNEYTIINCMRDNNSGWKVSLNHNEIIWTLQDNSGINQKLAFNYGNANGISDYINKWIFVTITNDRLGDSKLYINGNLIDKKSILNLGNIHVSDNILFKIVNCSYTRYIGIRYFNIFDKELDETEIQTLYNNEPNANILKDFWGNYLLYDKEYYLLNVLKPNNFINRRTDSTLSINNIRSTILLANRLYSGIKVKIQRVNNSSTNDNLVRKNDQVYINFVASKTHLLPLYADTATTNKEKTIKISSSGNRFNQVVVMNSVGNCTMNFKNNNGNNIGLLGFKADTVVASTWYYTHMRDNTNSNGFFWNFISEEHGWQEK

SEQ ID NO: 6 - protein, 1274 aa, Clostridium botulinum
MPVAINSFNYNDPVNDDTILYMQIPYEEKSKKYYKAFEIMRNVWIIPERNTIGTNPSDFDPPASLKNGSSAYYDPNYLTTDAEKDRYLKTTIKLFKRINSNPAGKVLLQEISYAKPYLGNDHTPIDEFSPVTRTTSVNIKLSTNVESSMLLNLLVLGAGPDIFESCCYPVRKLIDPDVVYDPSNYGFGSINIVTFSPEYEYTFNDISGGHNSSTESFIADPAISLAHELIHALHGLYGARGVTYEETIEVKQAPLMIAEKPIRLEEFLTFGGQDLNIITSAMKEKIYNNLLANYEKIATRLSEVNSAPPEYDINEYKDYFQWKYGLDKNADGSYTVNENKFNEIYKKLYSFTESDLANKFKVKCRNTYFIKYEFLKVPNLLDDDIYTVSEGFNIGNLAVNNRGQSIKLNPKIIDSIPDKGLVEKIVKFCKSVIPRKGTKAPPRLCIRVNNSELFFVASESSYNENDINTPKEIDDTTNLNNNYRNNLDEVILDYNSQTIPQISNRTLNTLVQDNSYVPRYDSNGTSEIEEYDVVDFNVFFYLHAQKVPEGETNISLTSSIDTALLEESKDIFFSSEFIDTINKPVNAALFIDWISKVIRDFTTEATQKSTVDKIADISLIVPYVGLALNIIIEAEKGNFEEAFELLGVGILLEFVPELTIPVILVFTIKSYIDSYENKNKAIKAINNSLIEREAKWKEIYSWIVSNWLTRINTQFNKRKEQMYQALQNQVDAIKTAIEYKYNNYTSDEKNRLESEYNINNIEEELNKKVSLAMKNIERFMTESSISYLMKLINEAKVGKLKKYDNHVKSDLLNYILDHRSILGEQTNELSDLVTSTLNSSIPFELSSYTNDKILIIYFNRLYKKIKDSSILDMRYENNKFIDISGYGSNISINGNVYIYSTNRNQFGIYNSRLSEVNIAQNNDIIYNSRYQNFSISFWVRIPKHYKPMNHNREYTIINCMGNNNSGWKISLRTVRDCEIIWTLQDTSGNKENLIFRYEELNRISNYINKWIFVTITNNRLGNSRIYINGNLIVEKSISNLGDIHVSDNILFKIVGCDDETYVGIRYFKVFNTELDKTEIETLYSNEPDPSILKNYWGNYLLYNKKYYLFNLLRKDKYITLNSGILNINQQRGVTEGSVFLNYKLYEGVEVIIRKNGPIDISNTDNFVRKNDLAYINVVDRGVEYRLYADTKSEKEKIIRTSNLNDSLGQIIVMDSIGNNCTMNFQNNNGSNIGLLGFHSNNLVASSWYYNNIRRNTSSNGCFWSSISKENGWKE

SEQ ID NO: 7 - protein, 1297 aa, Clostridium botulinum
  misc_feature (7)..(7): Xaa can be any naturally occurring amino acid
MPVNIKXFNYNDPINNDDIIMMEPFNDPGPGTYYKAFRIIDRIWIVPERFTYGFQPDQFNASTGVFSKDVYEYYDPTYLKTDAEKDKFLKTMIKLFNRINSKPSGQRLLDMIVDAIPYLGNASTPPDKFAANVANVSINKKIIQPGAEDQIKGLMTNLIIFGPGPVLSDNFTDSMIMNGHSPISEGFGARMMIRFCPSCLNVFNNVQENKDTSIFSRRAYFADPALTLMHELIHVLHGLYGIKISNLPITPNTKEFFMQHSDPVQAEELYTFGGHDPSVISPSTDMNIYNKALQNFQDIANRLNIVSSAQGSGIDISLYKQIYKNKYDFVEDPNGKYSVDKDKFDKLYKALMFGFTETNLAGEYGIKTRYSYFSEYLPPIKTEKLLDNTIYTQNEGFNIASKNLKTEFNGQNKAVNKEAYEEISLEHLVIYRIAMCKPVMYKNTGKSEQCIIVNNEDLFFIANKDSFSKDLAKAETIAYNTQNNTIENNFSIDQLILDNDLSSGIDLPNENTEPFTNFDDIDIPVYIKQSALKKIFVDGDSLFEYLHAQTFPSNIENLQLTNSLNDALRNNNKVYTFFSTNLVEKANTVVGASLFVNWVKGVIDDFTSESTQKSTIDKVSDVSIIIPYIGPALNVGNETAKENFKNAFEIGGAAILMEFIPELIVPIVGFFTLESYVGNKGHIIMTISNALKKRDQKWTDMYGLIVSQWLSTVNTQFYTIKERMYNALNNQSQAIEKIIEDQYNRYSEEDKMNINIDFNDIDFKLNQSINLAINNIDDFINQCSISYLMNRMIPLAVKKLKDFDDNLKRDLLEYIDTNELYLLDEVNILKSKVNRHLKDSIPFDLSLYTKDTILIQVFNNYISNISSNAILSLSYRGGRLIDSSGYGATMNVGSDVIFNDIGNGQFKLNNSENSNITAHQSKFVVYDSMFDNFSINFWVRTPKYNNNDIQTYLQNEYTIISCIKNDSGWKVSIKGNRIIWTLIDVNAKSKSIFFEYSIKDNISDYINKWFSITITNDRLGNANIYINGSLKKSEKILNLDRINSSNDIDFKLINCTDTTKFVWIKDFNIFGRELNATEVSSLYWIQSSTNTLKDFWGNPLRYDTQYYLFNQGMQNIYIKYFSKASMGETAPRTNFNNAAINYQNLYLGLRFIIKKASNSRNINNDNIVREGDYIYLNIDNISDESYRVYVLVNSKEIQTQLFLAPINDDPTFYDVLQIKKYYEKTTYNCQILCEKDTKTFGLFGIGKFVKDYGYVWDTYDNYFCISQWYLRRISENINKLRLGCNWQFIPVDEGWTE

SEQ ID NO: 8 - DNA, 25 bp, Clostridium botulinum
cccaataacaattaacaactttaat

SEQ ID NO: 9 - DNA, 36 bp, Clostridium botulinum
tttctgcagctatttattatataatgatctaccatc

SEQ ID NO: 10 - DNA, 4067 bp, Clostridium botulinum
tgatatgtaataatgatatgtcaaaatatttgtatttatggtcatttaaataattaataatttaattaattttaaatattataagaggtgttaaatatgccatttgttaataaacaatttaattataaagatcctgtaaatggtgttgatattgcttatataaaaattccaaatgcaggacaaatgcaaccagtaaaagcttttaaaattcataataaaatatgggttattccagaaagagatacctttacaaaccctgaagaaggagatttaaatccaccaccagaagcaaaacaagttccagtttcatattatgattcaacatatttaagtacagataatgaaaaagataattatttaaagggagttacaaaattatttgagagaatttattcaactgatcttggaagaatgttgttaacatcaatagtaaggggaataccattttggggtggaagtacaatagatacagaattaaaagttattgatactaattgtattaatgtgatacagccagatggtagttatagatcagaagagcttaatctagtaataataggaccctcagctgatattatacagtttgaatgtaaaagctttggacatgatgttttgaatcttacgcgaaatggttatggctctactcaatacattagatttagcccagattttacatttggttttgaggagtcacttgaagttgatacaaatcctcttttaggtgcaggcaaatttgctacagatccagcagtaacattagcacatgaacttatacatgccgaacatagattatatggaatagcaattaatccaaatagggtttttaaagtaaatactaatgcctattatgaaatgagtgggttagaagtaagctttgaggaacttagaacatttgggggacatgatgcaaagtttatagatagtttacaggaaaacgaatttcgtctatattattataataagtttaaagatgtagcaagtacacttaataaagctaaatcaataataggtactactgcttcattacagtatatgaaaaatgtttttaaagagaaatatctcctatctgaagatacatctggaaaattttcggtagataaattaaaatttgataagttatacaaaatgttaacagagatttacacagaggataattttgttaatttttttaaagtaattaacagaaaaacatatttgaattttgataaagccgtatttagaataaatatagtacctgatgaaaattacacaataaaggatggatttaatttaaaaggtgcaaatttatcaacaaattttaatggtcagaatacagaaattaatagtaggaattttactagattaaaaaattttacaggattatttgaattttataagctgctatgtgtaagagggataataccttttaaaactaaatcattagatgaaggatacaataaggcattaaatgatttatgtatcaaagttaataattgggacttgttttttagtccttcagaagataattttactaatgatttagataaagtagaagaaattacagctgataccaatatagaagcagcagaagaaaatattagtttagatttaatacaacaatattatttaacttttgattttgataatgaacctgaaaatatttcaatagaaaatctttcaagtgatattataggccaattagagcctatgcctaatatagaaagatttcctaatggaaaaaagtatgagttagataaatatactatgttccattatcttcgtgctcaagaatttgaacatggtgattctagaattatcttaacaaattctgctgaagaagcattattaaagcctaatgttgcttatacatttttttcttcaaaatatgtaaagaagattaataaagccgtagaggcatttatgtttttaaattgggcagaagagttagtatatgactttaccgatgaaactaatgaagtaactactatggataaaattgctgatataactataattgttccatatatagggcctgctttaaatataggtaatatgttatctaaaggagagtttgtagaagctataatatttacgggagttgttgctatgttagaatttataccagagtatgctctccctgtatttggtacttttgcaattgtatcatatattgccaataaggttctaactgttcaaacaataaataatgctttaagtaaaagaaatgaaaaatgggatgaagtctataaatatacagtaacaaattggctagcaaaggttaatacacagattgatctaataagggaaaaaatgaaaaaagctttagaaaatcaggcagaagcaacaaaggctataataaactatcagtataatcaatatactgaggaagagaaaaataatattaattttaatattgatgatttaagttcgaaacttaatgagtctataaatagcgctatgattaacataaataaatttttggatcaatgctctgtttcatatttaatgaattctatgataccttatgctgttaaacggttaaaagattttgatgctagtgttagagatgtattattaaagtatatatatgataatagaggaactttagttcttcaagtagatagattaaaagatgaagttaataatacacttagtgcagatataccttttcagctttccaaatacgtagataataaaaaattattatctacatttactgaatatattaagaatattgttaatacctctatattgagtatagtatataaaaaagatgatttaatagatttatctaggtatggagcaaaaataaatattggcgatagagtatattatgattcaatagataaaaatcaaattaaattaattaatttagaaagtagtacaattgaggtaattttaaaaaatgctattgtatataatagtatgtatgaaaattttagtactagcttttggataaaaattcctaagtattttagcaagataaatctaaataatgaatatacaataataaattgtatagaaaataattcaggatggaaagtatcacttaattatggtgaaataatctggactttgcaggataataagcaaaacatacaaagagtagtttttaaatacagtcaaatggttaatatatcagattatataaacagatggatttttgtaactatcactaataatagactaactaaatctaaaatttatataaatggaagattaatagatcaaaaaccaatttcaaatttaggtaatattcatgctagtaataagataatgtttaaattagatggctgtagagatccacgtagatacatcatgataaaatatttcaatcttttcgataaagaattaaatgaaaaagaaatcaaagatttatatgatagtcaatcaaattcaggtattttaaaagacttttggggtaattatttacaatatgataaaccatactatatgttaaatttatttgatccaaataaatatgtcgatgtaaataatataggtattagaggttatatgtatcttaaagggcctagaggtagcgtagtgactacaaacatttatttaaattcaactttgtatgaggggacaaaatttattataaaaaaatatgcttctggaaatgaagataatattgttagaaataatgatcgtgtatatattaatgtagtagttaaaaataaagaatataggttagctactaatgcatcacaggcaggcgtagaaaaaatactaagtgcattagaaatacctgatgtaggaaatctaagtcaagtagtagtaatgaagtcaaaagatgatcaaggaataagaaataaatgcaaaatgaatttacaagataataatgggaatgatataggctttataggatttcatttgtatgataatatagctaaactagtagcaagtaattggtataatagacaagtgggaaaagctagtaggactttcggttgttcatgggagtttattcctgtagatgatggatggggagaaagttcactgtaattaatctcaaactatatgaacctgtcaagaattttgtataaacattcataaaaatttttaaattaatatgtttaagaata

SEQ ID NO: 11 - DNA, 2078 bp, Clostridium botulinum
cttttgattttgataatgaacctgaaaatatttcaatagaaaatctttcaagtgatattataggccaattagagcctatgcctaatatagaaagatttcctaatggaaaaaagtatgagttagataaatatactatgttccattatcttcgtgctcaagaatttgaacatggtgattctagaattatcttaacaaattctgctgaagaagcattattaaagcctaatgttgcttatacatttttttcttcaaaatatgtaaagaagattaataaagccgtagaggcatttatgtttttaaattgggcagaagagttagtatatgactttaccgatgaaactaatgaagtaactactatggataaaattgctgatataactataattgttccatatatagggcctgctttaaatataggtaatatgttatctaaaggagagtttgtagaagctataatatttacgggagttgttgctatgttagaatttataccagagtatgctctccctgtatttggtacttttgcaattgtatcatatattgccaataaggttctaactgttcaaacaataaataatgctttaagtaaaagaaatgaaaaatgggatgaagtctataaatatacagtaacaaattggctagcaaaggttaatacacagattgatctaataagggaaaaaatgaaaaaagctttagaaaatcaggcagaagcaacaaaggctataataaactatcagtataatcaatatactgaggaagagaaaaataatattaattttaatattgatgatttaagttcgaaacttaatgagtctataaatagcgctatgattaacataaataaatttttggatcaatgctctgtttcatatttaatgaattctatgataccttatgctgttaaacggttaaaagattttgatgctagtgttagagatgtattattaaagtatatatatgataatagaggaactttagttcttcaagtagatagattaaaagatgaagttaataatacacttagtgcagatataccttttcagctttccaaatacgtagataataaaaaattattatctacatttactgaatatattaagaatattgttaatacctctatattgagtatagtatataaaaaagatgatttaatagatttatctaggtatggagcaaaaataaatattggcgatagagtatattatgattcaatagataaaaatcaaattaaattaattaatttagaaagtagtacaattgaggtaattttaaaaaatgctattgtatataatagtatgtatgaaaattttagtactagcttttggataaaaattcctaagtattttagcaagataaatctaaataatgaatatacaataataaattgtatagaaaataattcaggatggaaagtatcacttaattatggtgaaataatctggactttgcaggataataagcaaaacatacaaagagtagtttttaaatacagtcaaatggttaatatatcagattatataaacagatggatttttgtaactatcactaataatagactaactaaatctaaaatttatataaatggaagattaatagatcaaaaaccaatttcaaatttaggtaatattcatgctagtaataagataatgtttaaattagatggctgtagagatccacgtagatacatcatgataaaatatttcaatcttttcgataaagaattaaatgaaaaagaaatcaaagatttatatgatagtcaatcaaattcaggtattttaaaagacttttggggtaattatttacaatatgataaaccatactatatgttaaatttatttgatccaaataaatatgtcgatgtaaataatataggtattagaggttatatgtatcttaaagggcctagaggtagcgtagtgactacaaacatttatttaaattcaactttgtatgaggggacaaaatttattataaaaaaatatgcttctggaaatgaagataatattgttagaaataatgatcgtgtatatattaatgtagtagttaaaaataaagaatataggttagctactaatgca

SEQ ID NO: 12 - DNA, 33 bp, Clostridium botulinum
cgcggtaccacctttaattttgataatgaacct

SEQ ID NO: 13 - DNA, 31 bp, Clostridium botulinum
aacccctgcagttacagtggcctttctcccc

SEQ ID NO: 14 - DNA, 1817 bp, Clostridium botulinum
gttcaaacaataaataatgctttaagtaaaagaaatgaaaaatgggatgaagtctataaatatacagtaacaaattggctagcaaaggttaatacacagattgatctaataagggaaaaaatgaaaaaagctttagaaaatcaggcagaagcaacaaaggctataataaactatcagtataatcaatatactgaggaagagaaaaataatattaattttaatattgatgatttaagttcgaaacttaatgagtctataaatagcgctatgattaacataaataaatttttggatcaatgctctgtttcatatttaatgaattctatgataccttatgctgttaaacggttaaaagattttgatgctagtgttagagatgtattattaaagtatatatatgataatagaggaactttagttcttcaagtagatagattaaaagatgaagttaataatacacttagtgcagatataccttttcagctttccaaatacgtagataataaaaaattattatctacatttactgaatatattaagaatattgttaatacctctatattgagtatagtatataaaaaagatgatttaatagatttatctaggtatggagcaaaaataaatattggcgatagagtatattatgattcaatagataaaaatcaaattaaattaattaatttagaaagtagtacaattgaggtaattttaaaaaatgctattgtatataatagtatgtatgaaaattttagtactagcttttggataaaaattcctaagtattttagcaagataaatctaaataatgaatatacaataataaattgtatagaaaataattcaggatggaaagtatcacttaattatggtgaaataatctggactttgcaggataataagcaaaacatacaaagagtagtttttaaatacagtcaaatggttaatatatcagattatataaacagatggatttttgtaactatcactaataatagactaactaaatctaaaatttatataaatggaagattaatagatcaaaaaccaatttcaaatttaggtaatattcatgctagtaataagataatgtttaaattagatggctgtagagatccacgtagatacatcatgataaaatatttcaatcttttcgataaagaattaaatgaaaaagaaatcaaagatttatatgatagtcaatcaaattcaggtattttaaaagacttttggggtaattatttacaatatgataaaccatactatatgttaaatttatttgatccaaataaatatgtcgatgtaaataatataggtattagaggttatatgtatcttaaagggcctagaggtagcgtagtgactacaaacatttatttaaattcaactttgtatgaggggacaaaatttattataaaaaaatatgcttctggaaatgaagataatattgttagaaataatgatcgtgtatatattaatgtagtagttaaaaataaagaatataggttagctactaatgcatcacaggcaggcgtagaaaaaatactaagtgcattagaaatacctgatgtaggaaatctaagtcaagtagtagtaatgaagtcaaaagatgatcaaggaataagaaataaatgcaaaatgaatttacaagataataatgggaatgatataggctttataggatttcatttgtatgataatatagctaaactagtagcaagtaattggtataatagacaagtgggaaaagctagtaggactttcggttgttcatgggagtttattcctgtagatgatggatggggagaaagttcactgta

SEQ ID NO: 15 - DNA, 33 bp, Clostridium botulinum
cgcggtaccgttcaaacaatagataatgcttta

SEQ ID NO: 16 - DNA, 1299 bp, Clostridium botulinum
acatttactgaatatattaagaatattgttaatacctctatattgagtatagtatataaaaaagatgatttaatagatttatctaggtatggagcaaaaataaatattggcgatagagtatattatgattcaatagataaaaatcaaattaaattaattaatttagaaagtagtacaattgaggtaattttaaaaaatgctattgtatataatagtatgtatgaaaattttagtactagcttttggataaaaattcctaagtattttagcaagataaatctaaataatgaatatacaataataaattgtatagaaaataattcaggatggaaagtatcacttaattatggtgaaataatctggactttgcaggataataagcaaaacatacaaagagtagtttttaaatacagtcaaatggttaatatatcagattatataaacagatggatttttgtaactatcactaataatagactaactaaatctaaaatttatataaatggaagattaatagatcaaaaaccaatttcaaatttaggtaatattcatgctagtaataagataatgtttaaattagatggctgtagagatccacgtagatacatcatgataaaatatttcaatcttttcgataaagaattaaatgaaaaagaaatcaaagatttatatgatagtcaatcaaattcaggtattttaaaagacttttggggtaattatttacaatatgataaaccatactatatgttaaatttatttgatccaaataaatatgtcgatgtaaataatataggtattagaggttatatgtatcttaaagggcctagaggtagcgtagtgactacaaacatttatttaaattcaactttgtatgaggggacaaaatttattataaaaaaatatgcttctggaaatgaagataatattgttagaaataatgatcgtgtatatattaatgtagtagttaaaaataaagaatataggttagctactaatgcatcacaggcaggcgtagaaaaaatactaagtgcattagaaatacctgatgtaggaaatctaagtcaagtagtagtaatgaagtcaaaagatgatcaaggaataagaaataaatgcaaaatgaatttacaagataataatgggaatgatataggctttataggatttcatttgtatgataatatagctaaactagtagcaagtaattggtataatagacaagtgggaaaagctagtaggactttcggttgttcatgggagtttattcctgtagatgatggatggggagaaagttcactgtaa

SEQ ID NO: 17 - DNA, 34 bp, Clostridium botulinum
tcttggatccacatttactgaatatattaagaat

SEQ ID NO: 18 - DNA, 35 bp, Aequoria victoria
acatgcatgcatgagtaaaggagaagaacttttca

SEQ ID NO: 19 - DNA, 32 bp, Aequoria victoria
ccggtaccccaggcccatttgtagagctcatc

SEQ ID NO: 20 - protein, 146 aa, Clostridium botulinum
MSSERTFLPNGNYKIKSLFSDSLYLTYSSGALSFSNTSSLDNQKWKLEYISSSNGFRFSNVAEPNKYLAYNDYGFIYLSSSSNNSLWNPIKIAINSYIICTLSIVNVTDYAWTIYDNNNNITDQPILNLPNFDINNSNQILKLEKL

SEQ ID NO: 21 - protein, 146 aa, Clostridium botulinum
MSSERTFLPNGNYKIKSLFSDSLYLTYSSGALSFPNTSSLDNQKWKLEYISSSNGFRFSNVAEPNKYLAYNDYGFIYLSSSSNNSLWNPIKIAINSYIICTLSIVNVTDYAWTIYDNNNNITDQPILNLPNFDINNSNQILKLEKL

SEQ ID NO: 22 - protein, 146 aa, Clostridium botulinum; identical to SEQ ID NO: 20

SEQ ID NO: 23 - protein, 146 aa, Clostridium botulinum
MSSERTFLPNGNYKIKSLFSDSLYLTYSSGSLSFLNTSSLDNQKWKLEYISSSNGFRFSNVAEPNKYLAYNDYGFIYLSSSSNNSLWNPIKIAINSYIICTLSIVNVTDYAWTIYDNNNNITDQPILNLPNFDINNSNQILKLEKL

SEQ ID NO: 24 - protein, 146 aa, Clostridium botulinum
MSSERTFLPNGNYKIKSLFSNSLYLTYSSGALSFSNTSSLDNQKWKLEYISSSNGFRFSNVAEPNKYLAYNDYGFIYLSSSSNNSLWNPIKIAINSYIICTLSIVNVTDYAWTIYDNNNNITDQPILNLPNFDINNSNQILKLEKL

SEQ ID NO: 25 - protein, 146 aa, Clostridium botulinum; identical to SEQ ID NO: 24

SEQ ID NO: 26 - protein, 126 aa, Clostridium botulinum
MSSERTFLPNGNYKIKSLFSDSLYLTYSSGALSFSNTSSLDNQKWKLEYISSSNGFRFSNVAEPNKYLAYNDYGFIYLSSSSNNSLWNPIKIAINSYIICTLSIVNVTDYAWTIYDNNNNITDHLF

SEQ ID NO: 27 - protein, 146 aa, Clostridium botulinum
MSAERTFLPNGNYNIKSIFSGSLYLSPVSGSLTFSNESSANNQKWNVEYMAENRCFKISNVAEPNKYLSYDNFGFISLDSLSNRCYWFPIKIAVNTYIMLSLNKVNELDYAWDIYDTNENILSQPLLLLPNFDIYNSNQMFKLEKI

SEQ ID NO: 28 - protein, 158 aa, Clostridium botulinum
EYYHLIYKEVNYMSVERTFLPDGNYNIKSIFSGSLYLNPVSGSLTFSSESSANNQKWNVEYMAKNRCFKISNVAEPNKYLSYDNFGFISLDSLSNKCYWFPIKIAVNTYIMLNLNKVNELDYAWDIYDTNENILSQPLLLLPNFDIYNSNQMLKLEKI

SEQ ID NO: 29 - protein, 146 aa, Clostridium botulinum
MSVERTFLPNGNYNIKSIFSGSLYLNPVSKSLTFSNESSANNQKWNVEYMAENRCFKISNVAEPNKYLSYDNFGFISLDSLSNRCYWFPIKIAVNTYIMLSLNKVNELDYAWDIYDTNENILSQPLLLLPNFDIYNSNQMFKLEKI

SEQ ID NO: 30 - protein, 147 aa, Clostridium botulinum
MTAERTFLPHGNYKIKSIFSDSLYLTPLSEIITFLNTSSENNQKWKLQYVEEKNAYKISNIAQPDKYLTYNSSQFIVLKNIGDSTALENYWIPYKIASNTYIITNLKEYDKAWDIYDLNGDISDQPLLLQQLFYYEKSNQMFIFEKI

SEQ ID NO: 31 - protein, 33 aa, Clostridium botulinum
SAERTFLPNGNYNIKSIFSGSLYLSPVSGNLTF

SEQ ID NO: 32 - protein, 33 aa, Clostridium botulinum
  misc_feature (18)..(19): Xaa can be any naturally occurring amino acid
SAERTFLPNGNYNIKVIXXGSLYLSPVSGNLTF

SEQ ID NO: 33 - protein, 20 aa, Clostridium botulinum
SVERTFLPNGNYNIKSIFSG

SEQ ID NO: 34 - protein, 19 aa, Clostridium botulinum
SVERTFLPNGNYNIKSIFS

SEQ ID NO: 35 - protein, 178 aa, Clostridium botulinum
MNKLFLQIKMLKNDNREFQEIFKHFEKTINIFTRKYNIYDNYNDILYHLWYTLKKVDLSNFNTQNDLERYISRTLKRYCLDICNKRKIDKKIIYNSEIVDKKLSLIANSYSSYLEFEFNDLISILPDDQKKIIYMKFVEDIKEIDIAKKLNISRQSVYKNKIMALERLEPILKKLINM

SEQ ID NO: 36 - protein, 178 aa, Clostridium botulinum; identical to SEQ ID NO: 35

SEQ ID NO: 37 - protein, 178 aa, Clostridium botulinum
MNKLFLQIKMLKNDNEEFQEIFKHFEKTINIFTRKYNIYDNYNDILYHLWYTLKKVDLSNFNTQNDLERYISRTLKRYCLDICNKRKIDKKIIYNSEIADKKLSLIANSYSSYSEFEFNDLISILPDDQKKIIYMKFVEDIKEIDIAKKLNISRQSVYKNKIMALERLEPILKKLINM

SEQ ID NO: 38 - protein, 178 aa, Clostridium botulinum
MNKLFLQIEMLKNDNEEFQEIFKHFEKTINIFTRKYNIYDNYNDILYHLWYTLKKVDLSNFNTQNDLERYISRTLKRYCLDICNKRKIDKKIIYNSEIADKKLSLIANSYSSYSEFEFNDLISILPDDQKKIIYMKFVEDIKEIDIAKKLNISRQSVYKNKIMALERLEPILKKLINM

SEQ ID NO: 39 - protein, 178 aa, Clostridium botulinum
MNKLFLQIEMLKSDNEEFQEIFKHFEKTINIFTRKYNIYDNYNDILYHLWYTLKKVDLSNFNTQNDLERYISRTLKRYCLDICNKRKIDKKIIYNSEIADKKLSLIANSYSSYSEFEFNDLISILPDDQKKIIYMKFVEDIKEIDIAKKLNISRQSVYKNKIMALERLEPILKKLINM

SEQ ID NO: 40 - protein, 179 aa, Clostridium botulinum
MNKLFLQIKRLKNDNREFQEIFKNFEKTIDIFTRKYNIYDNYNDILYHLWYTLKKVDLSNFNTQNDLERYISRTLKRYCLDICNKRKIDKKIIYNSEIVGEKLRLIANSYSSYSEVEFNDLISILPDDQKKIIYMKFVEDIKEIDIAKKLNISRQSVYKNKIMALGRLKPILVYIFKKF

SEQ ID NO: 41 - protein, 178 aa, Clostridium tetani
MENLFVKIKTLKNNNKEFEVIIIHFKNTVNILIRKYNLESHYNDILYHLWNILKKIDLNKFNTENDLHKYISRSLKRYCLDICNKKNRDKKIIYNSEITNIKLNLMENSCSNYLNFEFNDLISILPENQRKILYMKFFEDMKECDIAKKLHMSRQAVYKNKVLALKKLEPIVNKLINI

SEQ ID NO: 42 - protein, 179 aa, Clostridium tetani
MLMENLFVKIKTLKNNNKEFEVIIIHFKNTVNILIRKYNLESHYNDILYHLWNILKKIDLNKFNTENDLHKYISRSLKRYCLDICNKKNRDKKIIYNSEITNIKLNLMENSCSNYLNFEFNDLISILPENQRKILYMKFFEYMKECDIAKLHMSRQAVYKNKVLALKKLEPIVNKLINI

SEQ ID NO: 43 - protein, 181 aa, Clostridium botulinum
MKIMKDIFLHVKTLKNNNTEFEEIYRNFENFIDMLTRKYDVEKDYNDIVSHLWIILKKTDLNKFNTEYDLEKYISTSLKRYCIDICNKKNRNERVIYNSEFVDINLSLIEHSFSNDLEFEFNDLISILPNSQRKIIYMRFFNNMKEVDIAEELNISRQAVYKSKNLALKKLESVIKELINI

SEQ ID NO: 44 - protein, 159 aa, Clostridium botulinum
MENLFFIIKILKDDNKKFEDIYTNYKNLIDIFIKKYNLSENYNDILNHFWIILKKADLNKFNTENDLNKYISKCLKRYCLSICTKKNRDKKIIYNSEITDINLNLIQDNCFSDIEFEFKDLISILPNNQKNIIYMKFFKDMKDIEIAKKLKISRQSIYK

SEQ ID NO: 45 - protein, 159 aa, Clostridium botulinum
MEDLFFIIKILKDDNKKFEDIYTNYKNLIDIFIKKYNLSENYNDILNHFWIILKKADLNKFNTENDLNKYISKCLKRYCLSICMKKNRDKKIIYNSEITNINLNLIQDNCFNDIEFEFKDLISILPNTQKNIIYMKFFKDMKDIQIAKKLKISRQSVYK

SEQ ID NO: 46 - protein, 159 aa, Clostridium botulinum
MKNLFFLMNTLKDDNKKFEDIYMNYKDLIDIFIKKYNLSENYNDILKHFWIILIKADLNKFNTENDLNKYISKCLKRYCLSICMKKNRDKKIIYNSEITDINLNLIQDSCFNDIEFEFKDLISILPNTQQNIIYMKFFKDMKDIDIAKKLKISRQSVYK

SEQ ID NO: 47 - protein, 116 aa, Clostridium botulinum
DIVSHLWIILIKADLNKFNTENDLNKYISKCLKRYCLSICMKKNRDKKIIYNSEITDINLNLIQDSCFNDIEFEFKDLISILPNTQQNIIYMKFFKDMKDIDIAKKLKISRQSIYK

SEQ ID NO: 48 - protein, 179 aa, Clostridium botulinum
MNDLFYAIENLKHDNQHFDFIEMSLKKYIEKTSKKYNLYYDYYNDILYHLWKELIEINLKNFNSELDLRKYISTSIKRYCINICKKKNRDKKIIYNSEATYKKLEAVNVYSLYCEDFEFLDLISILNYKEKQIIYMKFFECRKDNEIARRLHLSRQSIYKIRIKSLKKLYPIVMQLVNI

SEQ ID NO: 49 - protein, 179 aa, Clostridium botulinum
MNDLFYAIENLKHDNQHFNFIEMSLKKYIEKTSKKYNLYYDYYNDILYHLWKELIEINLKNFNSELDLRKYISTSIKRYCINICKKKNRDKKIIYNSEVTYKKLDAVNVYSLYCDNFEFLDLISILNYKEKQIIYMKFFECRKDNEIARRLHLSRQSIYKIRIKSLKKLYPIVMQLVNI

SEQ ID NO: 50 - protein, 179 aa, Clostridium botulinum phage 1C
MNDLFYAIENLKHDNQHFNFIEMSLKKYIEKTSKKYNLYYDYYNDILYHLWKELIEINLKNFNSELDLRKYISTSIKRYCINICKKKNRDKKIIYNSEVTYKKLDAVNVYSLYCDNFEFLDLISILNYKEKQIIYMKFFEGRKDNEIAIRLRLSRQSIYKIRITSLKKLYPIVMQLVNI

SEQ ID NO: 51 - protein, 116 aa, Clostridium botulinum
DIFNHLWIILIKADLNKFNTENDLNKYISKCLKRYCLSICMKKNRDKKIIYNSEITDINLNLIQDNCFNDIEFEFKDLISILPNTQQNIIYMKFFKDMKDIEIAKKLKISRQSIYK

SEQ ID NO: 52 - protein, 179 aa, Clostridium botulinum D phage
MNDLFYAIENLKHDNQHFNFIEMSLKKYIEKTSKKYNLYYDYYNDILYHLWKELIEINLKNFNSELDLRKYISTSIKRYCINICKKKNRDKKIIYNSEVTYKKLDAVNVYSLYCDNFEFLDLISILNYKEKQIIYMKFFEGRKDNEIAIRLRLSRQSIYKIRIKSLKKLYPIVMQLVNI

SEQ ID NO: 53 - protein, 179 aa, Clostridium botulinum
MNDLFYAIENLKHDNQNFNFIEMSLKKYIEKTSKKYNLYYDYYNDILYHLWKELIEINLKNFNSELDLRKYISTSIKRYCINICKKKNRDKKIIYNSEVTYKKLDAVNVYSLYCDNFEFLDLISILNYKEKQIIYMKFFEGRKDNEIAIRLRLSRQSIYKIRIKSLKKLYPIVMQLVNI

SEQ ID NO: 54 - protein, 184 aa, Clostridium difficile
MQKSFYELIVLARNNSVDDLQEILFMFKPLIKKLSRVLHYEEGETDLIIFFIELIKNIKLSSFSEKSDAIIVKYIHKSLLNKTFELSRRYSKMKFNFVEFDENILNLKNNYQNKFVFEEDICFFEYILKELSGIQRKVIFYKYLKGYSDREISVKLKISRQAVNKAKNRAFKKIKKDYENYFNL

SEQ ID NO: 55 - protein, 188 aa, Clostridium tetani
MVLSLGGDIMEFIEDVKSAQAGNKASFVKLIRHYEKYFYVVSKSILDKDEDCADAIQETILNCYKNIKSLNNPKCFKAWFTKCLINNCYKILKNNKKIILLDEIEDKKYSKDEFYLVELNHLLSTLDEDLKTVIFLYYFEDLSVKDISNAINVKEGTVKSRLHRARTKLYDILRKDGEAVSYERQVNR

SEQ ID NO: 56 - protein, 184 aa, Clostridium difficile
MQKSFYELIVLARNNSVDDLQEILFMFKPLVKKLSRVLHYEEGETDLIIFFIELIKNIKLSSFSEKSDAIIVKYIHKSLLNKTFELSRRYSKMKFNFVEFDENILNMKNNYQSKSVFEEDICFFEYILKELSGIQRKVIFYKYLKGYSDREISVKLKISRQAVNKAKNRAFKKIKKDYENYFNL

SEQ ID NO: 57 - protein, 140 aa, Clostridium perfringens
MKPSSFQETIENQFDYICKQVIEDERKDYFKHLDRLSAKEVSFSDIDNYLVNSFSTVDTYVTDFQLFKLFGLRINVESDLLSEALRHLSEKKRNIILLHYFMDMSDVEIAELLNLNRSTVYRHRISGLAMIKEFMKECKE

SEQ ID NO: 58 - protein, 291 aa, Clostridium botulinum
MEHYSTIQNSLNDKIVTISCKANTDLFFYQVPGNGNVSLFQQTRNYLERWRIIYDSNKAAYKIKSMNIYNTNLVLTWNAPTHNISALQDSNADNQYWLLLKDIGNNSFIIASYKNPNLVLYADTVARNLKLSTLNNSSYIKFIIEDYVISDFKNFTCRISPILAGGKVVQQVSMTNLAVNLYIWNNDLNQKWTIIYNEEKAAYQFFNKILSNGVLTWIFSDGNTVRVSSSAQNDAQYWLINPVSDNYDRYTITNLRYKTKVLDLYGGQTADGTTIQVFNSNGGDNQIWYGL

SEQ ID NO: 59 - protein, 294 aa, Clostridium botulinum
MEHYSTIQNSLNDKIVTISCKANTDLFFYQVPGNGNVSLFQQTRNYLERWRIIYDSNKAAYKIKSMNIYNTNLVLTWNAPTHNISAQQDSNADNQYWLLLKDIGNNSFIIASYKNPNLVLYADTVARNLKLSTLNNSSYIKFIIEDYVISDFKNFTCRISPILAGGKVVQQVSMTNLAVNLYIWNNDLNQKWTIIYNEEKAAYQFFNKILSNGVLTWIFSDGNTVRVSSSAQNNDAQYWLINPVSDNYDRYTITNLRDKTKVLDLYGGQTADGTTIQVFNSNGGDNQIWTMSNP

SEQ ID NO: 60 - protein, 293 aa, Clostridium botulinum
MEHYSVIQNSLNDKIVTISCRADTNLFFYQVAGNVSLFQQTRNYLERWRIIYDSNKAAYKIKSMDIHNTNLVLTWNAPTHNISTQQDSNADNQYWLLLKDIGNNSFIIASYKNPNLVLYADTVARNLKLSTLNNSNYIKFIIEDYIISDFNNFTCKISPILDRNKVVQQVATTNLNVNLYTWDYGRNQKWTIRYNEEKAAYQFFNTILSNGVLTWIFSNGNTVRVSSSNDQNNDAQYWLINPVSDTDETYTITNLRDTTKALDLYNSQTANGTAIQVFNSNGGDNQKWNIRNP

SEQ ID NO: 61 - protein, 293 aa, Clostridium botulinum
MEHYSVIQNSLNDKIVTISCKADTNLFFYQVAGNVSLFQQTRNYLERWRLIYDSNKAAYKIKSMDIHNTNLVLTWNAPTHNISTQQDSNADNQYWLLLKDIGNNSFIIASYKNPNLVLYADTVARNLKLSTLNNSNYIKFIIEDYIISDLNNFTCKISPILDLNKVVQQVDVTNLNVNLYTWDYGRNQKWTIRYNEEKAAYQFFNTILSNGVLTWIFSNGNTVRVSSSNDQNNDAQYWLINPVSDTDETYTITNLRDTTKALDLYGGQTANGTAIQVFNYHGDDNQKWNIRNP

SEQ ID NO: 62 - protein, 292 aa, Clostridium botulinum
MEHYSVIQNSLNDEIVTISCKADTNLFFYQTVGNVSLFQQTRNYLERWRLIYDANKAAYKIKSMDSHNTNLVLTWNAPTHNISAQQDSNADNQYWLLLKDIGSNSFIIASYKNPNLVLYADTVARNLKLSTLNNSSYIKFIIEDYMISDFNNFTCKISPILDSSKVVQQVAMTDLSVNLYTWDYGRNQKWTIKYNKEKSAYQFFNTILSNGVLTWISSNGNTVRVSSIAQNNDAQYWLINPVSNAYETYTITNLHDTTKALDLYNSQTANGTTIQVFNYHGDDNQKWFIRNP

SEQ ID NO: 63 - protein, 293 aa, Clostridium botulinum
MEHYSVIQNSLNDKIVTISCKADTNLFFYQVAGNVSLFQQTRNYLERWRLIYDSNKAAYKIKSMDIHNTNLVLTWNAPTHNISTQQDSNADNQYWLLLKDIGNNSFIIASYKNPNLVLYADTVARNLKLSTLNNSNYIKFIIEDYIISDLNNFTCKISPILDRNKVVQQVDMTNLNVNLYTWDYGRNQKWTIRYNEEKAAYQFFNTILSNGVLTWIFSNGNTVRVSSSNDQNNDAQYWLINPVSDTDETYTITNLRDTTKALDLYNSQTANGTAIQVFNYHGDDNQKWNIRNP

SEQ ID NO: 64 - protein, 279 aa, Clostridium botulinum
MEHYSVIQNSLNDKIVTISCKADTNLFFYQVAGNVSLFQQTRNYLERWRLIYDSNKAAYKIKSMDIHNTNLVLTWNAPTHNISTQQDSNADNQYWLLLKDIGNNSFIIASYKNPNLVLYADTVARNLKLSTLNNSNYIKFIIEDYIISDLNNFTCKISPILDRNKVVQQVDMTNLNVNLYTWDYGRNQKWTIRYNEEKAAYQFFNTILSNGVLTWIFSNGNTVRVSSSNDQNNDAQYWLINPVSDTDETYTITNLRDTTKALDLYNSQTANGTAIQVFN

SEQ ID NO: 65 - protein, 285 aa, Clostridium botulinum
MSQTNANDLRNNEVFFISPSNNTNKVLDKISQSEVKLWNKLSGANQKWRLIYDTNKQAYKIKVMDNTSLILTWNAPLSSVSVKTDTNGDNQYWYLLQNYISRNVIIRNYMNPNLVLQYNIDDTLMVSTQTSSSNQFFKFSNCIYESFNNSTCKIQTSLTIKFIDKNQNSNNVTIWSWNNGDNQKWKILYNESKMAYTLTCIKNNEYLTWFSSIGNNVGTYRTEGNNDQYWFINYLNNDASMYTISNFSNQSKFLDVVNSGLADGTNVQVWDSNGTSAQKWIITRL

SEQ ID NO: 66 - protein, 291 aa, Clostridium botulinum D phage
MGGNNMSQTNANDLRNNEVFFISPSNNTNKVLDKISQSEVKLWNKLSGANQKWRLIYDTNKQAYKIKVMDNTSLILTWNAPLSSVSVKTDTNGDNQYWYLLQNYISRNVIIRNYMNPNLVLQYNIDDTLMVSTQTSSSNQFFKFSNCIYEALNNRNCKLQTQLNSDRFLSKNLNSQIIVLWQWFDSSRQKWIIEYNETKSAYTLKCQENNRYLTWIQNSNNYVETYQSTDSLIQYWNINYLDNDASKYILYNLQDTNRVLDVYNSQIANGTHVIVDSYHGNTNQQWIINLI

SEQ ID NO: 67 - protein, 286 aa, Clostridium botulinum phage 1C
MSQTNANDLRNNEVFFISPSNNTNKVLDKISQSEVKLWNKLSGANQKWRLIYDTNKQAYKIKVMDNTSLILTWNAPLSSVSVKTDTNGDNQYWYLLQNYISRNVIIRNYMNPNLVLQYNIDDTLMVSTQTSSSNQFFKFSNCIYEALNNRNCKLQTQLNSDRFLSKNLNSQIIVLWQWFDSSRQKWIIEYNETKSAYTLKCQENNRYLTWIQNSNNYVETYQSTDSLIQYWNINYLDNDASKYILYNLQDTNRVLDVYNSQIANGTHVIVDSYHGNTNQQWIINLI

SEQ ID NO: 68 - protein, 285 aa, Clostridium botulinum
SQTNANDLRNNEVFFISPSNNTNKVLDKISQSEVKLWNKLSGANQKWRLIYDTNKQAYKIKVMDNTSLILTWNAPLSSVSVKTDTNGDNQYWYLLQNYISRNVIIRNYMNPNLVLQYNIDDTLMVSTQTSSSNQFFKFSNCIYEALNNRNCKLQTQLNSDRFLSKNLNSQIIVLWQWFDSSRQKWIIEYNETKSAYTLKCQENNRYLTWIQNSNNYVETYQSTDSLIQYWNINYLDNDASKYILYNLQDTNRVLDVYNSQIANGTHVIVDSYHGNTNQQWIINLI

SEQ ID NO: 69 - protein, 286 aa, Clostridium botulinum
MSQTNANDLRNNEVFFISPSNNTNKVLDKISQSEVKLWNKLSGANQKWRLIYDTNKQAYTIKVMDNTSLILTWDAPLSSVSVKTDTNTNNQYWYLLQDYISRNVILRNYMNPNLVLQYNTDDTLIVSTQTNSNNQFFKFSNCIYEALNNRNCKLQTQLNSDRFLSKNLNSQIIVLWQWFDSSRQKWTIEYNETKSAYTLKCQENNRYLTWIQNSNNYVETYQSTDSLIQYWNINYLDNDASKYILYNLQDTNRVLDVYNSQTANGTHVIVDSYHGNTNQQWIINLI

SEQ ID NO: 70 - protein, 286 aa, Clostridium botulinum
MSQTNANDLRNNEVFFISPSNSTNKVLDKISQSEVKLWSKNLGSNQKWRLIYDTNKQAYKIKVMDNTSLILTWDAPLSSVSVKTDTNTNNQYWYLLQDYISRNVILRNYMNPNLVLQYNTDDTLIVSTQTSSNNQFFKFSNCIYEALNNRNCKLQTQLNSDRFLSKNLNSQIIVLWQWFDSSRQKWLIEYNETKSAYTLKCQENNRYLTWIQNSNNYVETYQSTDSLIQYWNINYLDNDASKYILYNLQDTNRVLDVYNSQIANGTNVIVDSYHGNTNQQWIINLI

SEQ ID NO: 71 - protein, 147 aa, Clostridium botulinum; identical to SEQ ID NO: 30

SEQ ID NO: 72 - protein, 623 aa, Clostridium botulinum
MSLSIKELYYAKDKSINNVNLADGNYVVNRGDGWILSRQNQNLGGNISNNGCTAIVGDLRIRETATPYYYPTASFNEEYIRNNVQNVFANFTEASEIPIGFEFSKTAPSNKSLYMYLQYTYIRYEIIKVLQNTVIERAVLYVPSLGYVKSIEFNSGEQIDKNFYFTSEDKCILNEKFIYKKIAETTTAKESNDSNNTTNLNTSQTILPYPNGLYVINKGDGYMRTNDKDLIGTLLIETNTSGSIIQPRLRNTTRPLFNTSNPTLFSQEYTEARLNDAFNIQLFNTSTALFKFVEEAPDNKNISMKAYNTYEKYELINYQDGNIADKAEYYLPSLGKCEVSDAPSPQAPVVETPVDQDGFIQTGPNENIIVGVINPSENIEEISTPIPDDYTYNIPTSIQNNACYVLFTVNTTGVYKINAQNNLPPLIIYESIGSDNMNIQSNTLSNNNIKAINYITGTDSANAESYLIVSLIKNKNYYIRIPQISSSTTNQLIFKRELGNISDLANSTVNILDNLNTSGTHYYTRQSPDVGNYISYQLTIPGDFNNIASSIFSFRTRNNQGIGTLYRLTESINGYNLITIKNYSDLLNNVEPISLLNGATYIFRVKVTELNNYNIIFDAYRNS

SEQ ID NO: 73 - protein, 623 aa, Clostridium botulinum
MSLSIKELYYTKDKSINNVNLADGNYVVNRGDGWILSRQNQNLGGNISNNGCTAIVGDLRIRETATPYYYPTASFNEEYIRNNVQNVFANFTEASEIPIGFEFSKTAPSNKGLYMYLQYTYIRYEIIKVLRNTVIERAVLYVPSLGYAKSIEFNSGEQIDKNFYFTSEDKCILNEKFIYKKIAETTTAKESNDSNNTTNLNTSQTILPYPNGLYVINKGDGYMRTNDKDLIGTLLIETNTSGSIIQPRLRNTTRPLFNTSNPTLFSQEYTEARLNDAFNIQLFNTSTTLFKFVEEAPDNKNISMKAYNTYEKYELINYQNGNIADKAEYYLPSLGKCEVSDAPSPQAPVVETPVEQDGFIQTGPNENIIVGVINPSENIEEISTPIPDDYTYNIPTSIQNNACYVLFTVNTTGVYKINAQNNLPPLIIYESIGSDNMNIQSNTLSNNNIKAINYITGTDSSNAESYLIVSLIKNKNYYIRIPQISSSTTNQLIFKRELGNISDLANSTVNILDNLNTSGTHYYTRQSPDVGNYISYQLTIPGDFNNIASSIFSFRTRNNQGIGTLYRLTESINGYNLITIKNYSDLLNNVEPISLLNGATYIFRVKVTELNNYNIIFDAYRNS

SEQ ID NO: 74 - protein, 626 aa, Clostridium botulinum
MNSSIKKIYNDIQEKVINYSDTIDLADGNYVVRRGDGWILSRQNQILGGSVISNGSTGIVGDLRVNDNAIPYYYPTPSFNEEYIKNNIQTVFTNFTEANQIPIGFEFSKTAPSNKNLYMYLQYTYIRYEIIKVLQHEIIERAVLYVPSLGYVKSIEFNPGEKINKDFYFLTNDKCILNEQFLYKKILETTKNIPTNNIFNSKVSSTQRVLPYSNGLYVINKGDGYIRTNDKDLIGTLLIEAGSSGSIIQPRLRNTTRPLFTTSNDTKFSQQYTEERLKDAFNVQLFNTSTSLFKFVEEAPSDKNICIKAYNTYEKYELIDYQNGSIVNKAEYYLPSLGYCEVTNAPSPESEVVKMQVAEDGFIQNGPEEEIVVGVIDPSENIQEINTAISDNYTYNIPGIVNNNPFYILFTVNTTGIYKINTQNNLPPLKIYEAIGSGNRNLQAGNLCNNNIKAINYITGVDDPNTKSYLVVLLNKDKNYYIRVPQTSPNIENQIKFKREEGDLRNLMNSSVNIIDNLNSTGAHYYTRQSPDVGNYISYEFTVPGNFNNKDTSNIRLYTSNNQGIGTLFRVIETIDGYKLIGIRQNLHLLNNTNSIRLLNGAIYILKVEVTELNNYNIRLHIDITN

SEQ ID NO: 75 - protein, 626 aa, Clostridium botulinum
MNSSIKKIYNDIQEKVINYSDTIDLADGNYVVRRGDGWILSRQNQILGGSVISNGSTGIVGDLRVNDNAIPYYYPTPSFNEEYIKNNIQTVFTNFTEANQIPIGFEFSKTAPSNKNLYMYLQYTYIRYEIIKVLQHEIIERAVLYVPSLGYVKSIEFNPGEKINKDFYFLTNDKCILNEQFLYKKILETTKNIPTNNIFNSKVSSTQRVLPYSNGLYVINKGDGYIRTNDKDLIGTLLIEAGSSGSIIQPRLRNTTRPLFTTSNDTKFSQQYTEERLKDAFNVQLFNTSTSLFKFVEEAPSDKNICIKAYNTYEKYELIDYQNGSIVNKAEYYLPSLGYCEVTNAPSPESEVVKMQVAEDGFIQNGPEEEIVVGVIDPSENIQEINTAISDNYTYNIPGIVNNNPFYILFTVNTTGIYKINAQNNLPSLKIYEAIGSGNRNFQSGNLCDDDIKAINYITGFDSPNAKSYLVVLLNKDKNYYIRVPQTSSNIENQIQFKREEGDLRNLMNSSVNIIDNLNSTGAHYYTRQSPDVHDYISYEFTIPGNFNNKDTSNIRLYTSYNQGIGTLFRVTETIDGYNLINIQQNLHLLNNTNSIRLLNGAIYILKVEVTELNNYNIRLHIDITN

SEQ ID NO: 76 - protein, 442 aa, Clostridium botulinum
MNSSIKKIYNHIQEKVINYSDTIDLADGNYVVSRGDGWILSRQNQILGGSVISNGSTGIVGDLRVNDNAIPYYYPTPSFNEEYIKNNIQTVFTNFTEANQIPIGFEFSKTAPSNKNLYMYLQYTYIRYEIIKVLQHEIIERAVLYVPSLGYVKSIEFNLGEKINKDFYFLTNDKCILNEQFLYKKILETTKNIPTNNIFNSKVSSTQRVLPYSNGLYVINKGDGYIRTNDKDLIGTLLIEAGSSGSIIQPRLRNTTRPLFTTSNNTKFSQQYTEERLKDAFNVQLFNTSTSLFKFVEEAPSNKNICIKAYNTYEKYELIDYQNGSIINTAEYYLPSLGYCEVTNAPSPESEVVKTQVAEDGFVQNGPEEEIVVGVIDPSENIQEINTAISDNYTYSIPDIVDNNPFYILFTVNTTGIYKINAQNNLPPLKIYEAIGSSNKNM

SEQ ID NO: 77 - protein, 442 aa, Clostridium botulinum
MNSSIKKIYNDIQEKVINYSDTIDLADGNYVVRRGDGWILSRQNQILGGSVISNGSTGIVGDLRVNDNAIPYYYPTPSFNEEYIKNNIQTVFTNFTEANQIPIGYEFSKTAPSNKNLYMYLQYTYIRYEIIKVLQHEIIERAVLYVPSLGYVKSIEFNPGEKINKDFYFLTNDKCILNEQFLYKKILETTKNIPTNNIFNSKVSSTQRVLPYSNGLYVINKGDGYIRTNDKDLIGTLLIEAGSSGSIIQPRLRNTTRPLFTTSNDTKFSQQYTEERLKDAFNVQLFNTSTSLFKFVEEAPSDKNICIKAYNTYEKYELIDYQNGSIVNKAEYYLPSLGYCEVTNAPSPESEVVKMQVAEDGFIQNGPEEEIVVGVIDPSENIQEINTAISDNYIYSIPGIVNNNPFYILFTVNTTGIYKINAQNNLPPLKIYEAIGSGNRNM

SEQ ID NO: 78 - protein, 488 aa, Clostridium botulinum
MDSSIKKNFNNTEEETINFTAFNLDDGNYVVNRGDGWILSRQNQILGGTEVRSGSTGIVGDLRVRDNTTPYCYPTSSFNEKYIRDIVQNVFGNFNEVNQIPIGFECSRTAPDNKNLYMYLQYTYIRYEIIKVLQQQITERAVLYVPSLGYVKSIEFNSNEKIDKNFYFQVDDKCILNEQFLYKKISSTNTNKNIKNDNIDNTNSETNKTQPLVPYSNGLYVINKGDGYIRTNDRDLIGTLLIEANSSGSIIQPRLRNTTEPIFISSNLTKFSQQYTEERLKDAFNIKLFNTSTALFKFVEEAPANKNICIKAYNTYEKYELVEYRNGTIINSAQYYLPSLGYSEVIDVPSSGAPVVETPIVETQFIQKGPEEEIVIGVISPDENIQQINTAISESYTYDIPDIVGKKPFYILFTVNNTNFYKISAEDNSVPLKIYEVIGSGNRNMQDGNLSNDNIKAINYITGFDFSDKDYLIVQLFKGKNYYIRIPQ

SEQ ID NO: 79 - protein, 319 aa, Clostridium perfringens
MLSNNLNPMVFENAKEVFLISEDLKTPINITNSNSNLSDGLYVIDKGDGWILGEPSVVSSQILNPNETGTFSQSLTKSKEVSINVNFSVGFTSEFIQASVEYGFGITIGEQNTTERSVSTTAGPNEYVYYKVYATYRKYQAIRISHGNISDDGSIYKLTGIWLSKTSADSLGNIDQGSLIETGERCVLTVPSTDIEKEILDLAAATERLNLTDALNSNPAGNLYDWRSSNSYPWTQKLNLHLTITATGQKYRILASKIVDFNIYSNNFNNLVKLEQSLGDGVKDHYVDISLDAGQYVLVMKANSSYSGNYPYSILFQKF

SEQ ID NO: 80 - protein, 320 aa, Clostridium perfringens
MLSNNLNPMVFENAKEVFLISEDLKTPINITNSNSNLSDGLYVIDKGDGWILGEPSVVSSQILNPNETGTFSQSLTKSKEVSINVNFSVGFTSEFIQASVEYGFGITIGEENTIERSVSTTAGPNEYVYYKVYATYRKYQAIRISHGNISDDGSIYKLTGIWLSKTSADSLGNIDQGSLIETGERCVLTVPSTDIEKEILDLAAATERLNLTDALNSNPAGNLYDWRSSNSYPWTQKLNLHLTITATGQKYRILASKIVDFNIYSNNFNNLVKLEQSLGDGVKDHYVDISLDAGQYVLVMKANSSYSGNSHPYSILFQKF

SEQ ID NO: 81 - protein, 319 aa, Clostridium perfringens
MLSNNLNPMVFENAKEVFLISEDLKTPINITNSNSNLSDGLYVIDKGDGWILGEPSVVSSQILNPNETGTFSQSLTKSKEVSINVNFSVGFTSEFIQASVEYGFGITIGEQNTIERSVSTTAGPNEYVYYKVYATYRKYQAIRISHGNISDDGSIYKLTGIWLSKTSADSLGNIDQGSLIETGERCVLTVPSTDIEKEILDLAAATERLNLTDALNSNPAGNLYDWRSSNSYPWTQKLNLHLTITATGQKYRILASKIVDFNIYSNNFNNLVKLEQSLGDGVKDHYVDISLDAGQYVLVMKANSSYSGNYPYSILFQKF

SEQ ID NO: 82 - protein, 319 aa, Clostridium perfringens
MVSNNLNPMVFENAKEVFLISEDLKTPINITNSNSNLSDGLYVIDKGDGWILGEPSVVSSQILNPNETGTFSQSLTKSKEVSINVNFSVGFTSEFIQASVEYGFGITIGEQNTIERSVSTTAGPNEYVYYKVYATYRKYQAIRISHGNISDDGSIYKLTGIWLSKTSADSLGNIDQGSLIETGERCVLTVPSTDIEKEILDLAAATERLNLTDALNSNPAGNLYDWRSSNSYPWTQKLNLHLTITATGQKYRILASKIVDFNIYSNNFNNLVKLEQSLGDGVKDHYVDISLDAGQYVLVMKANSSYSGNYPYSILFQKF

SEQ ID NO: 83 - protein, 319 aa, Clostridium perfringens
MLSNNLNPMVFENAKEVFLISEDLKTPINITNSNSNLSDGLYVIDKGDGWILGEPSVVSSQILNPNETGTFSQSLTKSKEVSINVNFSVGFTSEFIQASVEYGFGITIGEQNTIERSVSTTAGPNEYVYYKVYATYRKYQAIRISHGNISDSGSIYKLTGIWLMKTSADSLGNIDQGSLIETGERCVLTVPSTDIEKEILDLAAATERLNLTDALNSNPAGNLYDWRSSNSYPWTQKLNLHLTITATGQKYRILASKIVDFNIYSNNFNNLVKLEQSLGDGVKDHYVDISLDAGQYVLVMKANSSYSGNYPYSILFQKF

SEQ ID NO: 84 - protein, 42 aa, Clostridium botulinum
MNSSIKKIYNHIQEKVINYSDTIDLADGNYVVSRGDGWILSR

SEQ ID NO: 85 - protein, 309 aa, Clostridium perfringens
MLSNNLNPMVFENAKEVFLISEDLKTPINITNNNLSNSNLSDGLYVIDKGDGLILGEPSVLSSQILNPNETGTFSQSLTKSKEVSINVVGFIQASVEYFTSEFTIERSVSTTAGPNEYVYYKVYATYRKYQAIRISHGNISDDGSIYKLTGIWLSKTSADSLGNIDQGSLIETGERCVLTVPSTDIEKEILDLAAATERLNLTDALNSNPAGNLYDYRSSNSYPWTQKLNLHLTITATGQKYRILASKIVDFNIYSNNFNLVKLEQSLGDGVKDHYVDLSLDAGQYVLVMKANSSYSGNYPYSILFQKF

SEQ ID NO: 86 - protein, 1197 aa, Clostridium botulinum
MNINDNLSINSPVDNKNVVVVRARKTDTIFKAFKVAPNIWVAPERYYGESLSIDEEYKVDGGIYDSNFLSQDSEKDKFLQAIITLLKRINSTNAGEKLLSLISTAIPFPYGYIGGGYYAPNMITFGSAPKSNKKLNSLISSTIPFPYAGYRETNYLSSEDNKNFYASNIVIFGPGSNIVENNTVFYKKEDAENGMGTMTEIWFQPFLTYKYDQFYIDPAIELMKCLIKSLYFLYGIKPSDDLVVPYRLRNELENIEYSQLNIVDLLVSGGIDPKFINTDPYWFIDNYFSNAKKVFEDHRNIYKTEVEGNNAIGNDIKLRLKQKFRINTNDIWELNLNYFSKEFSIMMPDRFNNALKHFYRKQYYKIDYPENYSINGFVNGQINAQLFLSDRNQDIINKPEEIINLLNGNNVSLMRSNIYGDGLKSTVDDFYSNYKIPYNRAYEYHFNNSNDSSLDNVNTGVIDNIPEIIDVNPYKENCDKFSPVQKITSTREINTNIPWPINYLQAQNTNNERFSLSSDFVEVVSSKDKSLVYSFLSNVMFYLDSIKDNSPIDTDKEYYLWLREIFRNYSFDITATQEINTNCGINKVVAWFGKALNILNTSDSFVEEFQNLGPSSLINKKENLSMPIIEIDEIPNYMLGLPLNDLNEKLFNIYLKNILYFKKVYFNFLDQWWTEYYSQYFDLICMAKQSILAQEKLIKQIIQNKLQDLSKADISMDKLNLMNLATGKTFIDLSNESQIAIDNINDFLNKSAICFFDTNIYPKFISFMEQCINSVNSNVTTFIQKCTNITEDEKLQLIKLNTFMNIDFEFFDIQNIKDLITSETDLIKEEKESDYNLFLLTLQEDNNKVIEDISGKNTLVKYSDSISLVYGVNGDALYLKEPNESVSFSNKVFENGLTNSFSICFWLRNLGEDIITSKLIENKADNCGWEIYFENNGLVFSIVDCNGNEENIYLSDVISKNWYYISISIDRLRNQLLIFINDKLIANQSIEQILNIYSSSTISLVNENNPIYVEGLSILNRSITSEEVVNNYFSYLNNSYIRDISGERLEYNKIYELYNYVFPENSLYEVTENNNIYLSIKDTNDLNIQGAKFKLINIDTNKQYVQKWDEGVVCLLGDEEKYVDISSENNRIQLVSSRDTAKKIIFNNDIFKPNCLTFAYNNKYLSLSFRDRNYNWMIYNNNDNIPKAAHLWTLKGI

SEQ ID NO: 87 - protein, 1197 aa, Clostridium botulinum; identical to SEQ ID NO: 86

SEQ ID NO: 88 - protein, 1197 aa, Clostridium botulinum
MNINDNLSINSPVDNKNVVVVRARKTDTVFKAFKVAPNIWVAPERYYGESLSIDEEYKVDGGIYDSNFLSQDSEKDKFLQAIITLLKRINSTNAGEKLLSLISTAIPFPYGYIGGGYYAPNMITFGSAPKSNKKLNSLISSTIPFPYAGYRETNYLSSEDNKSFYASNIVIFGPGANIVENNTVFYKKEDAENGMGTMTEIWFQPFLTYKYDEFYIDPAIELIKCLIKSLYFLYGIKPSDDLVIPYRLRSELENIEYSQLNIVDLLVSGGIDPKFINTDPYWFTDNYFSNAKKVFEDHRNIYETQIEGNNAIGNDIKLRLKQKFRININDIWELNLNYFSKEFSIMMPDRFNNALKHFYRKQYYKIDYPENYSINGFVNGQINVQLSLSDRNQDIINKPEEIINLLNGNNVSLMRSNIYGDGLKSTVDDFYSNYKIPYNRAYEYHFNNSNDSSLDNVNIGVIDNIPEIIDVNPYKENCDKFSPVQKITSTREINTNIPWPINYLQAQNTNNEKFSLSSDFVEVVSSKDKSLVYSFLSNVMFYLDSIKDNSPIDTDKKYYLWLREIFRNYSFDITATQEINTDCGINKVVTWFGKALNILNTSDSFVEEFQNLGPISLINKKENLSMPIIEIYGIPNDMLGLPLNDLNEKLFNIYLKNILYFKKVYFNFLDQWWTEYYSQYFDLICMAKQSILAQEKLIKQIIQNKLQDLFKADISMDKLNLMNLATEKTFIDLSNESQIAINNINDFLNKSAICVFDTNIYPKFISFMEQCINSVNSNVTAFIQKCTNITEDEKLQLIKLNTFMNIDFEFFDIQSIKDLITSETDLIKEEKESDYNLFLFTLQEDNNKVIEDISGKNTLVKYSDSISLVYGVNGDALYLKEPDESVSFSNKAFENGLTNSFSICFWLRNLGEDIITSKLIENKADNCGWEIYFENNGLVFSIVDCNGNEENIYLSDVISKNWYYISISIDRLRNQLLIFINDKLIANQSIEQILNIYSSNTISLVNENNPIYIEGLSILNRSITSEEVVNNYFSYLNNSYIRDISGERLEYNKTYELYNYVFPENSLYEVTENNNIYLSIKDTNNLNIQGAKFKLINIDANKQYVQKWDEGVVCLLGDEEKYVDISSENNRIQLVNSKDTAKRIIFNNDIFMPNCLTFAYNNKYLSLSLRDRNYNWMICNNNDNIPKAAHLWALKGI

SEQ ID NO: 89 - protein, 1197 aa, Clostridium botulinum; identical to SEQ ID NO: 88

SEQ ID NO: 90 - protein, 1198 aa, Clostridium botulinum
MNINDNLSINSPVDNKNVVVVRARKTDTVFKAFKVAPNIWVAPERYYGESLSIDEEYKVDGGIYDSNFLSQDSEKDKFLQAIITLLKRINSTNAGEKLLSLISTAIPFPYGYIGGGYYAPNMITFGSAPKSNKKLNSLISSTIPFPYAGYRETNYLSSEDNKSFYASNIVIFGPGANIVENNTVFYKKEDAENGMGTMTEIWFQPFLTYKYDEFYIDPAIELIKCLIKSLYFLYGIKPSDDLVIPYRLRSELENIEYSQLNIVDLLVSGGIDPKFINTDPYWFIDNYFSNAKKVFEDHRNIYETEIEGNNAIGNDIKLRLKQKFRININDIWELNLNYFSKEFSIMMPDRFNNALKHFYRKQYYKIDYPENYSINGFVNGQINAQLSLSDRNQDIINKPEEIINLLNGNNVSLMRSNIYGDGLKSTVDDFYSNYKIPYNRAYEYHFNNSNDSSLDNVNIGVIDNIPEIIDVNPYKENCDKFSPVQKITSTREINTNIPWPINYLQAQNTNNEKFSLSSDFVEVVSSKDKSLVYSFLSNVMFYLDSIKDNSPIDTDKKYYLWLREIFRNYSFDITATQEINTDCGINKVVTWFGKALNILNTSDSFVEEFQNLGPISLINKKENLSMPKIEIDEIPNSMLNLSFKDLSENLFNIFSKNNSYFEKIYYDFLDQWWTQYYSQYFDLICMAKRSVLAQESLIKKIIQKKLSYLIGNSNISSDNLALMNLTTTNTLRDISNESQIAMNNVNNFLNNVAICVFQTNIYPKFISFMEQCINNINKNTREFIQKCTNITENEKLQLINQNIFSSLDFDFLNIENLKSLFNSETGLLIKEETSPYELVLYAFQEPGNNAIGDASGKNTSIEYSKDIGLVYGINSDALYLNGSNQSISFSNDFFENGLTNSFSIYFWLRNLGKDTIKSKLIGSKEDNCGWEIYFQDTGLVFNMIDSNGNEKNIYLSDVSNNSWHYITISVDRLKEQLLIFIDDNLVANGSIKEILNIYSSNTISLVNENNPIYVEGLSILNRSITSEEVVNNYFTYLNNSYIRDISGERLEYNKTYELYNYVFPESSLYEVTENNNIYLSIKNTNNLNIQGAKFKLINIDANKQYVQKWDEGVVCLLGDEEKYVDISSENNRIQLVSSKDTAKRIIFNNDIFRPNCLTFAYNNKYLSLSLRDRNYNWMICNNNDNIPKAAHLWALKGI

SEQ ID NO: 91 - protein, 1198 aa, Clostridium botulinum
MNINDNLSINSPVDNKNVVVVRARKTDTVFKAFKVAPNIWVAPERYYGESLSIDEEYKVDGGIYDSNFLSQDSEKDKFLQAIITLLKRINSTNAGEKLLSLISTAIPFPYGYIGGGYYAPNMITFGSAPKSNKKLNSLISSTIPFPYAGYRETNYLSSEDNKSFYASNIVIFGPGANIVENNTVFYKKEDAENGMGTMTEIWFQPFLTYKYDEFYIDPAIELIKCLIKSLYFLYGIKPSDDLVIPYRLRSELENIEYSQLNIVDLLVSGGIDPKFINTDPYWFIDNYFSNAKKVFEDHRNIYETEIEGNNAIGNDIKLRLKQKFRININDIWELNLNYFSKEFSIMMPDRFNNALKHFYRKQYYKIDYPENYSINGFVNGQINAQLSLSDRNQDIINKPEEIINLLNGNNVSLMRSNIYGDGLKSTVDDFYSNYKIPYNRAYEYHFNNSNDSSLDNVNIGVIDNIPEIIDVNPYKENCDKFSPVQKITSTREINTNIPWPINYLQAQNTNNEKFSLSSDFVEVVSSKDKSLVYSFLSNVMFYLDSIKDNSPIDTDKKYYLWLREIFRNYSFDITATQEINTDCGINKVVTWFGKALNILNTSDSFVEEFQNLGPISLINKKENLSMPKIEIDEIPNSMLNLSFKDLSENLFNIFSKNNSYFEKIYYDFLDQWWTQYYSQYFDLICMAKRSVLAQESLIKKIIQKKLSYLIGNSNISSDNLALMNLTTTNTLRDISNESQIAMNNVNNFLNNVAICVFQTNIYPKFISFMEQCINNINKNTREFIQKCTNITENEKLQLINQNIFSSLDFDFLNIENLKSLFNSETGLLIKEETSPYELVLYAFQEPGNNAIGDASGKNTSIEYSKDIGLVYGINSDALYLNGSNQSISFSNDFFENGLTNSFSIYFWLRNLGKDTIKSKLIGSKEDNCGWEIYFQDTGLVFNMIDSNGNEKNIYLSDVSNNSWHYITISVDRLKEQLLIFIDDNLVANESIKEILNIYSSNTISLVNENNPIYVEGLSILNRSITSEEVVNNYFTYLNNSYIRDISGERLEYNKTYELYNYVFPESSLYEVTENNNIYLSIKNTNNLNIQGAKFKLINIDANKQYVQKWDEGVVCLLGDEEKYVDISSENNRIQLVSSKDTAKRIIFNNDIFRPNCLTFAYNNKYLSLSLRDRNYNWMICNNNDNIPKAAHLWALKGI

SEQ ID NO: 92 - protein, 1193 aa, Clostridium botulinum
MNINDNLSINSPVDNKNVVVVRARKTDTVFKAFKVAPNIWVAPERYYGESLSIDEEYKVDGGIYDSNFLSQDSEKDKFLQAIITLLKRINSTNAGEKLLSLISTAIPFPYGYIGGGYYAPNMITFGSAPKSNKKLNSLISSTIPFPYAGYRETNYLSSEDNKSFYASNIVIFGPGANIVENNTVFYKKEDAENGMGTMTEIWFQPFLTYKYDEFYIDPAIELIKCLIKSLYFLYGIKPSDDLVIPYRLRSELENIEYSQLNIVDLLVSGGIDPKFINTDPYWFTDNYFSNAKKVFEDHRNIYETEIEGNNAIGNDIKLRLKQKFRININDIWELNLNYFSKEFSIMMPDRFNNALKHFYRKQYYKIDYPENYSINGFVNGQINAQLSLSDRNQDIINKPEEIINLLNGNNVSLMRSNIYGDGLKSTVDDFYSNYKIPYNRAYEYHFNNSNDSSLDNVNIGVIDNIPEIIDVNPYKENCDKFSPVQKITSTREINTNIPWPINYLQAQNTNNEKFSLSSDFVEVVSSKDKSLVYSFLSNVMFYLDSIKDNSPIDTDKKYYLWLREIFRNYSFDITATQEINTNCGINKVVTWFGKALNILNTSDSFVEEFQNLGAISLINKKENLSMPIIESYEIPNDMLGLPLNDLNEKLFNIYSKNTAYFKKIYYNFLDQWWTQYYSQYFDLICMAKRSVLAQETLIKRIIQKKLSYLIGNSNISSDNLALMNLTTTNTLRDISNESQIAMNNVDSFLNNAAICVFESNIYPKFISFMEQCINNINIKTKEFIQKCTNINEDEKLQLINQNVFNSLDFEFLNIQNMKSLFSSETALLIKEETWPYELVLYAFKEPGNNVIGDASGKNTSIEYSKDIGLVYGINSDALYLNGSNQSISFSNDFFENGLTNSFSIYFWLRNLGKDTIKSKLIGSKEDNCGWEIYFQDTGLVFNMIDSNGNEKNIYLSDVSNNSWHYITISVDRLKEQLLIFIDDNLVANESIKEILNIYSSNIISLLSENNPSYIEGLTILNKPTTSQEVLSNYFEVLNNSYIRDSNEERLEYNKTYQLYNYVFSDKPICEVKQNNNIYLTINNTNNLNLQASKFKLLSINPNKQYVQKLDEVIISVLDNMEKYIDISEDNRLQLIDNKNNAKKMIISNDIFISNCLTLSYNGKYICLSMKDENHNWMICNNDMSKYLYLWSFK

SEQ ID NO: 93 - protein, 1193 aa, Clostridium botulinum
MNINDNLSINSPVDNKNVVVVRARKTDTVFKAFKVAPNIWVAPERYYGESLSIDEEYKVDGGIYDSNFLSQDSEKDKFLQAIITLLKRINSTNAGEKLLSLISTAIPFPYGYIGGGYYAPNMITFGSAPKSNKKLNSLISSTIPFPYAGYRETNYLSSEDNKSFYASNIVIFGPGANIVENNTVFYKKEDAENGMGTMTEIWFQPFLTYKYDEFYIDPAIELIKCLIKSLYFLYGIKPSDDLVIPYRLRSELENIEYSQLNIVDLLVSGGIDPKFINTDPYWFTDNYFSNAKKVFEDHRNIYETEIEGNNAIGNDIKLRLKQKFRININDIWGLNLNYFSKEFSIMMPDRFNNALKHFYRKQYYKIDYPENYSINGFVNGQINAQLSLSDRNQDIINKPEEIINLLNGNNVSLMRSNIYGDGLKSTVDDFYSNYKIPYNRAYEYHFNNSNDSSLDNVNIGVIDNIPEIIDVNPYKENCDKFSPVQKITSTREINTNIPWPINYLQAQNTNNEKFSLSSDFVEVVSSKDKSLVYSFLSNVMFYLDSIKDNSPIDTDKKYYLWLREIFRNYSFDITATQEINTNCGINKVVTWFGKALNILNTSDSFVEEFQNLGAISLINKKENLSMPIIESYEIPNDMLGLPLNDLNEKLFNIYSKNTAYFKKIYYNFLDQWWTQYYSQYFDLICMAKRSVLAQETLIKRIIQKKLSYLIGNSNISSDNLALMNLTTTNTLRDISNESQIAMNNVDSFLNNAAICVFESNIYPKFISFMEQCINNINIKTKEFIQKCTNINEDEKLQLINQNVFNSLDFEFLNIQNMKSLFSSETALLIKEETWPYELVLYAFKEPGNNVIGDASGKNTSIEYSKDIGLVYGINSDALYLNGSNQSISFSNDFFENGLTNSFSIYFWLRNLGKDTIKSKLIGSKEDNCGWEIYFQDTGLVFNMIDSNGNEKNIYLSDVSNNSWHYITISVDRLKEQLLIFIDDNLVANESIKEILNIYSSNIISLLSENNPSYIEGLTILNKPTTSQEVLSNYFEVLNNSYIRDSNEERLEYNKTYQLYNYVFSDKPICEVKQNNNIYLTINNTNNLNLQASKFKLLSINPNKQYVQKLDEVIISVLDNMEKYIDISEDNRLQLIDNKNNAKKMIISNDIFISNCLTLSYNGKYICLSMKDENHNWMICNNDMSKYLYLWSFK

SEQ ID NO: 94 - protein, 1193 aa, Clostridium botulinum
MNINDNLSINSPVDNKNVVVVRARKTDTVFKAFKVAPNIWVAPERYYGESLSIDEEYKVDGGIYDSNFLSQDSEKDKFLQAIITLLKRINSTNAGEKLLSLISTAIPFPYGYIGGGYYAPNMITFGSAPKSNKKLNSLISSTIPFPYAGYRETNYLSSEDNKSFYASNIVIFGPGANIVENNTVFYKKEDAENGMGTMTEIWFQPFLTYKYDEFYIDPAIELIKCLIKSLYFLYGIKPSDDLVIPYRLRSELENIEYSQLNIVDLLVSGGIDPKFINTDPYWFIDNYFSNAKKVFEDHRNIYETEIEGNNAIGNDIKLRLKQKFRININDIWELNLNYFSKEFSIMMPDRFNNALKHFYRKQYYKIDYPENYSINGFVNGQINAQLSLSDRNQDIINKPEEIINLLNGNNVSLMRSNIYGDGLKSTVDDFYSNYKIPYNRAYEYHFNNSNDSSLDNVNIGVIDNIPEIIDVNPYKENCDKFSPVQKITSTREINTNIPWPINYLQAQNTNNEKFSLSSDFVEVVSSKDKSLVYSFLSNVMFYLDSIKDNSPIDTDKKYYLWLREIFRNYSFDITATQEINTDCGINKVVTWFGKALNILNTSDSFVEEFQNLGPISLINKKENLSMPKIEIDEIPNSMLNLSFKDLSENLFNIFSKNNSYFEKIYYDFLDQWWTQYYSQYFDLICMAKRSVLAQESLIKKIIQKKLSYLIGNSNISSDNLALMNLTTTNTLRDISNESQIAMNNVNNFLNNVAICVFQTNIYPKFISFMEQCINNINKNTREFIQKCTNITENEKLQLINQNIFSSLDFDFLNIENLKSLFNSETGLLIKEETSPYELVLYAFQEPGNNAIGDASGKNTSIEYSKDIGLVYGINRDALYLNGSNQSISFSNDFFENGLTNSFSIYFWLRNLGKDTIKSKLIGSKEDNCGWEIYFQDTGLVFNMIDSNGNEKNIYLSDVSNNSWHYITISVDRLKEQLLIFIDDNLVANESIKEILNIYSSNTISLVNENNPIYVEGLSILNKPTTSQEVLSNYFKVLNNSYIRDSSEERLEYNKTYQLYNYVFSENPIYEIKQNNNIYLTINNTNNLNLQVSKFKLLSINPNKQYVQKLDEVIISVLDNMEKYIDISEDNRLQLIDNKNNAKKMIISNDIFISNCLIISYNGKYICLSMKDENHNWMICNNDMSKYLYLWSFK

SEQ ID NO: 95 - protein, 1198 aa, Clostridium botulinum
MKINSNLTINSPIDNKNVVIVRARETSKFFKAFKVAPNIWVAPERYYGESLSIEESKKVNGGVYDSNFLSQNNEKDKFLQAIITLLKRINSNIAGEKLLSLVSTAIPFPYGYIGGGYYCPNIVTFGSTIKYNKKINSLISTTIPFPYGGYRETNYLSSKDTENFYAANIVIFGPGANIVENNTVFYKKEDAENGMGTMAEICFQPFLTYKYDQFYVDPALELMECLIKSLYFLYGIKPNNNLTVPYRLRNELSNIEFSQLSIVDLLISGGIDSKFINTDPYWFIDSYFSNAKTTFEEHKSIYETEIKGNNAIGNDIKLRLKQKFQTTVHDIWQLNLDYFSKEFQIMMPYRFNNALKYYYRKEYYKIDYPEKYSIAGFVDGQLNTQLSLSDKNQYIINKPELIVNLISENNISLMRSNIYGDGLKYTTDNFYSTYKIPYNRAYEYHFNNSSTSSLENVNVEEISNIPEIIDINPYRENSDIFSPVENIIETKEVNTKTPWPINYLQAQIPNNEEFTLSSDFSQVVSYKTQSLVYSFLSNVISYLDSVKDTNPIDTDEKYYLWLREIFRNYSFDITAIEEINTSCGINKVVSWFGKALNILNTSNSFVKEFKNLGPISLINKKENLSMPIIEVNEIPNDMLGLSLKDLNEKLFNIYLKNILYFKKVYFSFLDQWWTEYYSQYFGLICMAKQSILAQENLIKKIVQKKLSDLSKQSNISNEKLNLMNLTTEKTFIDLSNQSQIAMNNINNFLNKAAICVFESNIYPKFISFMEQYINNINIKTTAFIRKCTNITEKEKLQLINQNTFNNLDFEFFDIQTIENLLTSETNLIIKEKTSPYDLLLFSLQEADRKVIKDISGKDTLVQYSDTIDLSYGVNGDALYLKEPNQSVNFSNNIFENGLTNSFSICFWLRNLGQDNLSSNLIGNIVNNCGWQIYFENNGLVFSMVDCNGNEKNIYLSDVLSKYWYYISVSVDRLRNKLLIFINDKLIVNESIEQILNIYSSNIISLVNENNPICIEELSILNKALTSEEVLNSYFTNLNNSYIRDSYGARLEYNKNYELYNYVFPENSLYEVIENNNMYLSIKNIKNTNILGAKFKLINTDESKQYVQKWDEVIICVLGDTEKYADIQAGNNRIQLVNSKDNARKIIVNNNIFRPNCVLFSYNNKYLSLSLRNRNYNWMICNDNSFIPKHAHLWILKKI

SEQ ID NO: 96 - protein, 1196 aa, Clostridium botulinum
MDINDDLNINSPVDNKNVVIVRARKTNTFFKAFKVAPNIWVAPERYYGEPLDIAEEYKLDGGIYDSNFLSQDSERENFLQAIITLLKRINNTISGKQLLSLISTAIPFPYGYVGGGYSSPNIFTFGKTPKSNKKLNSLVTSTIPFPFGGYRETNYIESQNNKNFYASNIVIFGPGSNIVENNVICYKKNDAENGMGTMAEILFQPLLTYKYNKFYIDPAMELTKCLIKSLYFLYGIKPSDDLVVPYRLRTELDNKQFSQLNIIDLLISGGVDLEFINTNPYWFTNSYFSNSIKMFEKYKNIYETEIEGNNAIGNDIKLRLKQKFQNSVQDIWNLNLNYFSKEFNSIIPDRFSNALKHFYRKQYYTMDYGDNYNINGFVNGQINTKLPLSDKNTNIISKPEKVVNLVNANNISLMKSNIYGDGLKGTTEDFYSTYKIPYNEEYEYRFNDSDNFPLNNISIEEVDSIPEIIDINPYKDNSDDLLFTQITSTTEEVITHTALPVNYLQAQIITNENFTLSSDFSKVVSSKDKSLVYSFLDNLMSYLETIKNDGPIDTDKKYYLWLKEVFKNYSFDINLTQEIDSSCGINEVVIWFGKALNILNTSNSFVEEYQNSGPISLISKKDNLSEPNIEIDDIPDSLLGLSFKDLNNKLYEIYSKNRVYFRKIYFNFLDQWWTEYYSQYFELICMAKQSILAQESVVKQIIQNKFTDLSKASIPPDTLKLIKETTEKTFIDLSNESQISMNRVDNFLNKASICVFVEDIYPKFISYMEKYINNINIKTREFIQRCTNINDNEKSILINSYTFKTIDFKFLNIQAIKNFFNSQVEQVMKEMLSPYQLLLFATRGPNSNIIEDISGKNTLIQYTESVELVYGVNGESLYLKSPNETVEFSNNFFTNGLTNNFTICFWLRFTGKDDDKTRLIGNKVNNCGWEIYFEDNGLVFEIIDSNGNQESVYLSNVINNNWYYISISVDRLKDQLLIFINDKNVANVSIEQILNIYSTNVISLVNKNNSIYVEELSVLDKPVASEEVIRNYFSYLDNSYIRDSSKSLLEYNKNYQLYNYVFPETSLYEVNDNNKSYLSLKNTDGINIPSVKFKLINIDESKGYVQKWDECIICVSDGTEKYLDISPENNRIQLVSSKDNAKKITVNTDLFRPDCITFSYNDKYFSLSLRDGDYNWMICNDNNKVPKGAHLWILKS

SEQ ID NO: 97 - protein, 1196 aa, Clostridium botulinum
MDINDDLNINSPVDNKNVVIVRARKTNTFFKAFKVAPNIWIAPERYYGEPLDIAEEYKLDGGIYDSNFLSQDSERENFLQAIITLLKRINNTISGKQLLSLISTAIPFPYGYVGGGYSSPNIFTFGKTPKSNKKLNSLVTSTIPFPFGGYRETNYIESPNNKDFYASNIVIFGPGSNIVENNVICYKKNDAENGMGTMAEILFQPLLTYKYNKFYIDPAMELTKCLIKSLYFLYGIKPSDGLVVPYRLRTELDNKQFSQLNIIDLLISGGVDLEFINTNPYWFTNSYFSNSIKMFEKYKNIYETEIEGNNAIGNDIKLRLRQKFQNSVQDIWNLNLNYFSKEFNSIIPDRFSNALKHFYRKQYYTMDYTDNYNINGFVNGQINTKLPLSDKNTNIISKPEKVVNLVNENNISLMKSNIYGDGLKGTTEDFYSTYKIPYNEEYEYRFNDSDNFPLNNISIEEVDSIPEIIDINPYKDNSDNLVFTQITSMTEEVTTHTALPINYLQAQITTNENFTLSSDFSKVVSSKDKSLVYSFLDNLMSYLETIKNDGPIDTDKKYYLWLKEVFKNYSFDINLTQEIDSSCGINEVVIWFGKALNILNTSNSFVEEYQNSGPISLISKKDNLSEPNIEIDDIPDSLLGLSFKDLNNKLYEIYSKNIVYFKKIYFNFLDQWWTEYYSQYFELICMAKQSILAQESLVKQIIQNKFTDLSKASIPPDTLKLIKETTEKTFIDLSKESQISMNRVDNFLNKASICVFVEDIYPKFISYMEKYINNINIKTREFIQRCTNINDNEKSILINSYTFKTIDFKFLDIQGIKNFFNSQVEQVMKEMLSPYQLLLFATRGPNSNIIEDISGKNTLIQYTESVELVYGVNGESLYLKSPNETVEFSNNFFTNGLTNNFTICFWLRFTGKDDDKTRLIGNKVNNCGWEIYFEDNGLVFEIIDSNGNQESVYLSNVINNNWYYISISVDRSKDQLLIFINDKNVANVSIEQILNIYSTNVISLVNKNNSIYVEELSVLDKTVTSEEVIRNYFSYLDNSYIRDSSKSLLEYNKNYQLYNYVFPKTSLYEVNDNNKSYLSLKNTDGINIPSVKFKLINIDESKGYVQKWDECIICVSDGTEKYLDISSENNRIQLVSSKDNAKKITVNTDLFRPDCITFSYNDKYFSLSLRDGDYNWMICNDNNKVPKGAHLWILES

SEQ ID NO: 98 - protein, 1196 aa, Clostridium botulinum
MDINDDLNINSPVDNKNVVIVRARKTNTFFKAFKVAPNIWVAPERYYGEPLDIAEEYKLDGGIYDSNFLSQDSERENFLQAIIILLKRINNTISGKQLLSLISTAIPFPYGYIGGGYSSPNIFTFGKTPKSNKKLNSLVTSTIPFPFGGYRETNYIESQNNKNFYASNIVIFGPGSNIVENNVIYYKKNDAENGMGTMAEIVFQPLLTYKYNKFYIDPAMELTKCLIKSLYFLYGIKPSDNLVVPYRLRTELDNKQFSQLNIIDLLISGGVDLEFINTNPYWFTNSYFPNSIKMFEKYKNIYKTEIEGNNAIGNDIKLRLKQKFQINVQDIWNLNLNYFCQSFNSIIPDRFSNALKHFYRKQYYTMDYTDNYNINGFVNGQINTKLPLSNKNTNIISKPEKVVNLVNENNISLMKSNIYGDGLKGTTEDFYSTYKIPYNEEYEYRFNDSDNFPLNNISIEEVDSIPEIIDINPYKDNSDNLVFTQITSMTEEVTTHTALSINYLQAQITNNENFTLSSDFSKVVSSKDKSLVYSFLDNLMSYLETIKNDGPIDTDKKYYLWLKEVFKNYSFDINLTQEIDSMCGINEVVLWFGKALNILNTSNSFVEEYQDSGAISLISKKDNLREPNIEIDDISDSLLGLSFKDLNNKLYEIYSKNIVYFKKIYFSFLDQWWTEYYSQYFELICMAKQSILAQESLVKQIVQNKFTDLSKASIPPDTLKLIRETTEKTFIDLSNESQISMNRVDNFLNKASICVFVEDIYPKFISYMEKYINNINIKTREFIQRCTNINDNEKSILINSYTFKTIDFKFLDIQSIKNFFNSQVEQVMKEILSPYQLLLFASKGPNSNIIEDISGKNTLIQYTESIELVYGVNGESLYLKSPNETIKFSNKFFTNGLTNNFTICFWLRFTGKNDDKTRLIGNKVNNCGWEIYFEDNGLVFEIIDSNGNQESVYLSNIINDNWYYISISVDRLKDQLLIFINDKNVANVSIDQILSIYSTNIISLVNKNNSIYVEELSVLDNPITSEEVIRNYFSYLDNSYIRDSSKSLLEYNKNYQLYNYVFPETSLYEVNDNNKSYLSLKNTDGINISSVKFKLINIDESKVYVQKWDECIICVLDGTEKYLDISPENNRIQLVSSKDNAKKITVNTDLFRPDCITFSYNDKYFSLSLRDGDYNWMICNDNNKVPKGAHLWILES

SEQ ID NO: 99 - protein, 1196 aa, Clostridium botulinum D phage
MDINDDLNINSPVDNKNVVIVRARKTNTFFKAFKVAPNIWVAPERYYGEPLDIAEEYKLDGGIYDSNFLSQDSERENFLQAIIILLKRINNTISGKQLLSLISTAIPFPYGYIGGGYSSPNIFTFGKTPKSNKKLNSLVTSTIPFPFGGYRETNYIESQNNKNFYASNIVIFGPGSNIVENNVIYYKKNDAENGMGTMAEIVFQPLLTYKYNKFYIDPAMELTKCLIKSLYFLYGIKPSDNLVVPYRLRTELDNKQFSQLNIIDLLISGGVDLEFINTNPYWFTNSYFPNSIKMFEKYKNIYKTEIEGNNAIGNDIKLRLKQKFQINVQDIWNLNLNYFCQSFNSIIPDRFSNALKHFYRKQYYTMDYTDNYNINGFVNGQINTKLPLSNKNTNIISKPEKVVNLVNENNISLMKSNIYGDGLKGSTEDFYSTYKIPYNEEYEYRFNDSDNFPLNNISIEEVDSIPEIIDINPYKDNSDNLVFTQITSMTEEVTTHTALSINYLQAQITNNENFTLSSDFSKVVSSKDKSLVYSFLDNLMSYLETIKNDGPIDTDKKYYLWLKEVFKNYSFDINLTQEIDSMCGINEVVLWFGKALNILNTSNSFVEEYQDSGAISLISKKDNLREPNIEIDDISDSLLGLSFKDLNNKLYEIYSKNIVYFKKIYFSFLDQWWTEYYSQYFELICMAKQSILAQESLVKQIVQNKFTDLSKASIPPDTLKLIRETTEKTFIDLSNESQISMNRVDNFLNKASICVFVEDIYPKFISYMEKYINNINIKTREFIQRCTNINDNEKSILINSYTFKTIDFKFLDIQSIKNFFNSQVEQVMKEILSPYQLLLFASKGPNSNIIEDISGKNTLIQYTESIELVYGVNGESLYLKSPNETIKFSNKFFTNGLTNNFTICFWLRFTGKNDDKTRLIGNKVNNCGWEIYFEDNGLVFEIIDSNGNQESVYLSNIINDNWYYISISVDRLKDQLLIFINDKNVANVSIDQILSIYSTNIISLVNKNNSIYVEELSVLDNPITSEEVIRNYFSYLDNSYIRDSSKSLLEYNKNYQLYNYVFPETSLYEVNDNNKSYLSLKNTDGINISSVKFKLINIDESKGYVQKWDECIICVLDGTEKYLDISPENNRIQLVSSKDNAKKITVNTDLFRPDCITFSYNDKYFSLSLRDGDYNWMICNDNNKVPKGAHLWILES

SEQ ID NO: 100 - protein, 1196 aa, Clostridium botulinum phage 1C
MDINDDLNINSPVDNKNVVIVRARKTNTFFKAFKVAPNIWVAPERYYGEPLDIAEEYKLDGGIYDSNFLSQDSERENFLQAIIILLKRINNTISGKQLLSLISTAIPFPYGYIGGGYSSPNIFTFGKTPKSNKKLNSLVTSTIPFPFGGYRETNYIESQNNKNFYASNVIIFGPGSNIVENNVIYYKKNDAENGMGTMAEIVFQPLLTYKYNKFYIDPAMELTKCLIKSLYFLYGIKPSDNLVVPYRLRTELDNKQFSQLNIIDLLISGGVDLEFINTNPYWFTNSYFPNSIKMFEKYKNIYKTEIEGNNAIGNDIKLRLKQKFQINVQDIWNLNLNYFCQSFNSIIPDRFSNALKHFYRKQYYTMDYTDNYNINGFVNGQINTKLPLSNKNTNIISKPEKVVNLVNENNISLMKSNIYGDGLKGTTEDFYSTYKIPYNEEYEYRFNDSDNFPLNNISIEEVDSIPEIIDINPYKDNSDNLVFTQITSMTEEVTTHTALSINYLQAQITNNENFTLSSDFSKVVSSKDKSLVYSFLDNLMSYLETIKNDGPIDTDKKYYLWLKEVFKNYSFDINLTQEIDSMCGINEVVLWFGKALNILNTSNSFVEEYQDSGAISLISKKDNLREPNIEIDDISDSLLGLSFKDLNNKLYEIYSKNIVYFKKIYFSFLDQWWTEYYSQYFELICMAKQSILAQESLVKQIVQNKFTDLSKASIPPDTLKLIRETTEKTFIDLSNESQISMNRVDNFLNKASICVFVEDIYPKFISYMEKYINNINIKTREFIQRCTNINDNEKSILINSYTFKTIDFKFLDIQSIKNFFNSQVEQVMKEILSPYQLLLFASKGPNSNIIEDISGKNTLIQYTESIELVYGVNGESLYLKSPNETIKFSNKFFTNGLTNNFTICFWLRFTGKNDDKTRLIGNKVNNCGWEIYFEDNGLVFEIIDSNGNQESVYLSNIINDNWYYISISVDRLKDQLLIFINDKNVANVSIDQILSIYSTNIISLVNKNNSIYVEELSVLDNPITSEEVIRNYFSYLDNSYIRDSSKSLLEYNKNYQLYNYVFPETSLYEVNDNNKSYLSLKNTDGINISSVKFKLINIDESKVYVQKWDECIICVLDGTEKYLDISPENNRIQLVSSKDNAKKITVNTDLFRPDCITFSYNDKYFSLSLRDGDYNWMICNDNNKVPKGAHLWILES

SEQ ID NO: 101 - protein, 1196 aa, Clostridium botulinum
MDINDDLNINSPVDNKNVVIVRARKTNTFFKAFKVAPNIWVAPERYYGEPLDIAEEYKLDGGIYDSNFLSQDSERENFLQAIIILLKRINNTISGKQLLSLISTAIPFPYGYIGGGYSSPNIFTFGKTPKSNKKLNSLVTSTIPFPFGGYRETNYIESQNNKNFYASNIVIFGPGSNIVENNVIYYKKNDAENGMGTMAEIVFQPLLTYKYNKFYIDPAMELTKCLIKSLYFLYGIKPSDNLVVPYRLRTELDNKQFSQLNIIDLLISGGVDLEFINTNPYWFTNSYFPNSIKMFEKYKNIYKTEIEGNNAIGNDIKLRLKQKFQINVQDIWNLNLNYFCQSFNSIIPDRFSNALKHFYRKQYYTMDYTDNYNINGFVNGQINTKLPLSNKNTNIISKPEKVVNLVNENNISLMKSNIYGDGLKGTTEDFYSTYKIPYNEEYEYRFNDSDNFPLNNISIEEVDSIPEIIDINPYKDNSDNLVFTQITSMTEEVTTHTALSINYLQAQITNNENFTLSSDFSKVVSSKDKSLVYSFLDNLMSYLETIKNDGPIDTDKKYYLWLKEVFKNYSFDINLTQEIDSMCGINEVVLWFGKALNILNTSNSFVEEYQDSGAISLISKKDNLREPNIEIDDISDSLLGLSFKDLNNKLYEIYSKNIVYFKKIYFSFLDQWWTEYYSQYFELICMAKQSILAQESLVKQIVQNKFTDLSKASIPPDTLKLIRETTEKTFIDLSNESQISMNRVDNFLNKASICVFVEDIYPKFISYMEKYINNINIKTREFIQRCTNINDNEKSILINSYTFKTIDFKFLDIQSIKNFFNSQVEQVMKEILSPYQLLLFASKGPNSNIIEDISGKNTFIQYTESIELVYGVNGESLYLKSPNETIKFSNKFFTNGLTNNFTICFWLRFTGKNDDKTRLIGNKVNNCGWEIYFEDNGLVFEIIDSNGNQESVYLSNIINDNWYYISISVDRLKDQLLIFINDKNVANVSIDQILSIYSTNIISLVNKNNSIYVEELSVLDNPITSEEVIRNYFSYLDNSYIRDSSKSLLEYNKNYQLYNYVFPETSLYEVNDNNKSYLSLKNTDGINISSVKFKLINIDESKGYVQKWDECIICVLDGTEKYLDISPENNRIQLVSSKDNAKKITVNTDLFRPDCITFSYNDKYFSLSLRDGDYNWMICNDNNKVPKGAHLWILES

SEQ ID NO: 102 - protein, 1196 aa, Clostridium botulinum
MDINDDLNINSPVDNKNVVIVRARKTNTFFKAFKVAPNIWVAPERYYGEPLDIAEEYKLDGGIYDSNFLSQDSERENFLQAIIILLKRINNTISGKQLLSLISTAIPFPYGYIGGGYSSPNIFTFGKTPKSNKKLNSLVTSTIPFPFGGYRETNYIESQNNKNFYASNIIIFGPGSNIVENNVIYYKKNDAENGMGTMAEIVFQPLLTYKYNKFYIDPAMELTKCLIKSLYFLYGIKPSDNLVVPYRLRTELDNKQFSQLNIIDLLISGGVDLEFINTNPYWFTNSYFPNSIKMFEKYKNIYKTEIEGNNAIGNDIKLRLKQKFQINVQDIWNLNLNYFCQSFNSIIPDRFSNALKHFYRKQYYTMDYTDNYNINGFVNGQINTKLPLSNKNTNIISKPEKVVNLVNENNISLMKSNIYGDGLKGTTEDFYSTYKIPYNEEYEYRFNDSDNFPLNNISIEEVDSIPEIIDINPYKDNSDNLVFTQITSMTEEVTTHTALSINYLQAQITNNENFTLSSDFSKVVSSKDKSLVYSFLDNLMSYLETIKNDGPIDTDKKYYLWLKEVFKNYSFDINLTQEIDSMCGINEVVLWFGKALNILNTSNSFVEEYQDSGAISLISKKDNLREPNIEIDDISDSLLGLSFKDLNNKLYEIYSKNIVYFKKIYFSFLDQWWTEYYSQYFELICMAKQSILAQESLVKQIVQNKFTDLSKASIPPDTLKLIRETTEKTFIDLSNESQISMNRVDNFLNKASICVFVEDIYPKFISYMEKYINNINIKTREFIQRCTNINDNEKSILINSYTFKTIDFKFLDIQSIKNFFNSQVEQVMKEILSPYQLLLFASKGPNSNIIEDISGKNTLIQYTESIELVYGVNGESLYLKSPNETIKFSNKFFTNGLTNNFTICFWLRFTGKNDDKTRLIGNKVNNCGWEIYFEDNGLVFEIIDSNGNQESVYLSNIINDNWYYISISVDRLKDQLLIFINDKNVANVSIDQILSIYSTNIISLVNKNNSIYVEELSVLDNPITSEEVIRNYFSYLDNSYIRDSSKSLLEYNKNYQLYNYVFPETSLYEVNDNNKSYLSLKNTDGINISSVKFKLINIDESKVYVQKWDECIICVLDGTEKYLDISPENNRIQLVSSKDNAKKITVNTDLFRPDCITFSYNDKYFSLSLRDGDYNWMICNDNNKVPKGAHLWILES

SEQ ID NO: 103 - protein, 1193 aa, Clostridium botulinum
MDINDDLNINSPVDNKNVVIVRARKTNTFFKAFKVAPNIWVAPERYYGEPLHIAEEYKLDGGIYDSNFLSQDSERENFLQAIIILLKRINNTISGKQLLSLISTAIPFPYGYIGGGYSSPNIFTFGKTPRTNKKLNSLVTSTIPFPFGGYRETNYIESQNNKNFYASNIIIFGPGSNIVENNVIYYKKNDAENGMGTMAEIVFQPLLTYKYNKFYIDPAMELTKCLIKSLYFLYGIKPSGNLVVPYRLRTELDNKQFSQLNIIDLLISGGVDLEFINTNPYWFTNSYFPNSIKMFEKYKNIYKTEIEGNNAIGNDIKLRLKQKFQINVQDIWNLNLNYFCQSFNSIIPDRFSNALKHFYRKQYYTMDYTDNYNINGFVNGQINTKLPLSNKNTNIISKPEKVVNLVNENNISLMKSNIYGDGLKGTTEDFYSTYKIPYDEEYEYRFNDSDNFPLNNISIEEVDSIPEIIDINPYKDNSDNLVFTQITSMTEEVTTHTALSINYLQAQITNNENFTLSSDFSKVVSSKDKSLVYSFLDNLMSYLETIKNDRPIHTDKKYYLWLKEVFKNYSFDINLTQEIDSMCGINQVVLWFGKALNILNTSNSFVEEYQDSGAISLISKKDNLREPNIEIDDISDSLLGLSFKDLNNKLYEIYSKNIVYFKKIYFSFLDQWWTQYYSQYFDLICMAKKSILAQETLIKKIIQKKLSYLIGNSNISSDNLALMNLTTTNTLRDISNESQIAMNNVDSFLNSAAICVFEGNIYPKFISFMEQCINNINKNTREFIQKCTNITENEKLQLINQNIFSSLDFDFLNIENLKSLFSSETALLIKEETSPYELVLYAFQEPDNNAIGDASAKNTSIEYSKDIDLVYGINSDALYLNGSNQSISFSNDFFENGLTNSFSIYFWLRNLGKDTIKSKLIGSKGDNCGWEIYFQDTGLVFNMIDSNGNEKNIYLSDVSNNSWHYITISVDRLKEQLLIFIDDNLVANESIKEILNIYSSNIISLLSENNPSYIEGLTILNKPTTSQEVLNNYFKVLNNSYIRDSNEERLEYNKTYQLYNYVFSDKPICEVKQNNNIYLTINNTNNLNLQPSKFKLLSINPNKQYVQKLDEVIISVLGNMEKYIDISEDNRLQLIDNKNGAKKMIISNDMFISNCLTLSCGGKYICLSMKDENHNWMICNNDMSKYLYLWSFK

SEQ ID NO: 104 - protein, 1193 aa, Clostridium botulinum
MDINDDLNINSPVDNKNVVIVRARKTNTFFKAFKVAPNIWVAPERYYGEPLHIAEEYKLDGGIYDSNFLSQDSERENFLQAIIILLKRINNTISGKQLLSLISTAIPFPYGYIGGGYSSPNIFTFGKTPRTNKKLNSLVTSTIPFPFGGYRETNYIESQNNKNFYASNIIIFGPGSNIVENNVIYYKKNDAENGMGTMAEIVFQPLLTYKYNKFYIDPAMELTKCLIKSLYFLYGIKPSGNLVVPYRLRTELDNKQFSQLNIIDLLISGGVDLEFINTNPYWFTNSYFPNSIKMFEKYKNIYKTEIEGNNAIGNDIKLRLKQKFQINVQDIWNLNLNYFCQSFNSIIPDRFSNALKHFYRKQYYTMDYTDNYNINGFVNGQINTKLPLSNKNTNIISKPEKVVNLVNENNISLMKSNIYGDGLKGTTEDFYSTYKIPYDEEYEYRFNDSDNFPLNNISIEEVDSIPEIIDINPYKDNSDNLVFTQITSMTEEVTTHTALSINYLQAQITNNENFTLSSDFSKVVSSKDKSLVYSFLDNLMSYLETIKNDRPIHTDKKYYLWLKEVFKNYSFDINLTQEIDSMCGINQVVLWFGKALNILNTSNSFVEEYQDSGAICLISKKDNLREPNIEIDDISDSLLGLSFKDLNNKLYEIYSKNIVYFKKIYFSFLDQWWTQYYSQYFDLICMAKKSILAQETLIKKIIQKKLSYLIGNSNISSDNLALMNLTTTNTLRDISNESQIAMNNVDSFLNSAAICVFEGNIYPKFISFMEQCINNINKNTREFIQKCTNITENEKLQLINQNIFSSLDFDFLNIENLKSLFSSETALLIKEETSPYELVLYAFQEPDNNAIGDASAKNTSIEYSKDIDLVYGINSDALYLNGSNQSISFSNDFFENGLTNSFSIYFWLRNLGKDTIKSKLIGSKGDNCGWEIYFQDTGLVFNMIDSNGNEKNIYLSDVSNNSWHYITISVDRLKEQLLIFIDDNLVANESIKEILNIYSSNIISLLSENNPSYIEGLTILNKPTTSQEVLNNYFKVLNNSYIRDSNEERLEYNKTYQLYNYVFSDKPICEVKQNNNIYLTINNTNNLNLQPSKFKLLSINPNKQYVQKLDEVIISVLGNMEKYIDISEDNRLQLIDNKNGAKKMIISNDMFISNCLTLSCGGKYICLSMKDENHNWMICNNDMSKYLYLWSFK

SEQ ID NO: 105 - protein, 1161 aa, Clostridium botulinum
MKINNNFNIDSPVDNKDVAIVRGRKTDIFLKVFQVAPNIWVAPERYYGESLNINEDQKSNGGIYDSNFLLTNDEKDEFLQATVKILQRINNNVIGAKLLSLISTAIPFPYEYRAEDYRQTNYLSSKDNQHYYTANLVIFGPGTNIVENNVVYYKKEDSKNGMGTMSEIWFQPFLTYKYDQFYVDPALELIKCLIKSLYYLYGIKPNDDLSIPYRLRSEFNSLEYSELDMVDFLISGGTDYKLLNTNPYWFTDNYFINAPKNFEKYKNDYETKIKNNNDIANSIKLYLEQKFKTNVQDIWELNLSYFSTEFEIMMPEIFNNALNHYHRKEYYVIDYFKNYNINGFINGQIKTILPLSKYNKNIINKPELIVNLINENNSVLMKSNIYGDGLKDTIGNFYAVYKIPYNIGDEYHINSSDSCLDNVDIKEIDNIPPINDADIYPYRKNCDPFTPVYNITETKEINTTIPFPVNYLQAQVTNSNDINLSSDFLKVISSKDRSLVYSFLDNTIDYLDSIKYDGPIDTDKKYYLWLKEIFRNYSFDITATQEINTDCGINKVVTWFGKALNILNTSDSFVEEFQNLGPISLINKKENLSMPKIEIDEIPNSMLNLSFKDLSENLFNIFSKNNSYFEKIYYDFLDQWWTQYYSQYFDLICMAKRSVLAQESLIKKIIQKKLSYLIGNSNISSDNLALMNLTTTNTLRDISNESQIAMNNVNNFLNNVAICVFQTNIYPKFISFMEQCINNINKNTREFIQKCTNITENEKLQLINQNIFSSLDFDFLNIENLKSLFNSETGLLIKEETSPYELVLYAFQEPGNNAIGDASGKNTSIEYSKDIGLVYGINSDALYLNGSNQSISFSNDFFENGLTNSFSIYFWLRNLGKDTIKSKLIGSKEDNCGWEIYFQDTGLVFNMIDSNGNEKNIYLSDVSNNSWHYITISVDRLKEQLLIFIDDNLVANESIKEILNIYSSNTISLVNENNPIYVEGLSILNKPTTSQEVLSNYFKVLNNSYIRDSSEERLEYNKTYQLYNYVFSENPIYEIKQNNNIYLTINNTNNLNLQVSKFKLLSINPNKQYVQKLDEVIISVLDNMEKYIDISEDNRLQLIDNKNNAKKMIISNDIFISNCLIISYNGKYICLSMKDENHNWMICNNDMSKYLYLWSFK

SEQ ID NO: 106 - protein, 1161 aa, Clostridium botulinum
MKINNNFNINSLVDNKDVAIVRGRKTDIFLKVFQVAPNIWVAPERYYGESLNINEDQKSNGGIYDSNFLLTNDEKDEFLQATVKILQRINNNVIGAKLLSLISTAIPFPYEYRAEDYRQTNYLSSKDNQHYYTANLVIFGPGTNIVENNVVYYKKEDSKNGMGTMSEIWFQPFLTYKYDQFYVDPALELIKCLIKSLYYLYGIKPNDDLSIPYRLRSEFNSLEYSELDMVDFLISGGTDYKLLNTNPYWFTDNYFINAPKNFEKYKNDYETKIKNNNDIANSIKLYLEQKFKTNVQDIWELNLSYFSTEFEIMMPEIFNNALNHYHRKEYYVIDYFKNYNINGFINGQIKTILPLSKYYKNIINKPELIVNLINENNSVLMKSNIYGDGLKDTIGNFYAVYKIPYNIGDEYHINSSDSCLDNVDIKEINNIPPINDADIYPYRKNCDPFTPVYNITETKEINTTIPFPVNYLQAQVTNSNDINLSSDFLKVISSKDRSLVYSFLDNTIDYLDSIKYDGPIDTDKKYYLWLKEIFRNYSFDITATQEINTDCGINKVVTWFGKALNILNTSDSFVEEFQNLGPISLINKKENLSMPKIEIDEIPNSMLNLSFKDLSENLFNIFSKNNSYFEKIYYDFLDQWWTQYYSQYFDLICMAKRSVLAQESLIKKIIQKKLSYLIGNSNISSDNLALMNLTTTNTLRDISNESQIAMNNVNNFLNNVAICVFQTNIYPKFISFMEQCINNINKNTREFIQKCTNITENEKLQLINQNIFSSLDFDFLNIENLKSLFNSETGLLIKEETSPYELVLYAFQEPGNNAIGDASGKNTSIEYSKDIGLVYGINRDALYLNGSNQSISFSNDFFENGLTNSFSIYFWLRNLGKDTIKSKLIGSKEDNCGWEIYFQDTGLVFNMIDSNGNEKNIYLSDVSNNSWHYITISVDRLKEQLLIFIDDNLVANESIKEILNIYSSNTISLVDENNPIYVEGLSILNKPTTSQEVLSNYFKVLNNSYIRDSSEERLEYNKTYQLYNYVFSENPIYEIKQNNNIYLTINNTNNLNLQVSKFKLLSINPNKQYVQKLDEVIISVLDNMEKYIDISEDNRLQLIDNKNNAKKMIISNDIFISNCLIISYNGKYICLSMKDENHNWMICNNDMSKYLYLWSFK

SEQ ID NO: 107 - protein, 1163 aa, Clostridium botulinum
MKINNNFNIDSPVDNKDVAIVRGRKTDIFLKVFQVAPNIWVAPERYYGESLNINEDQKSDGGIYDSNFLLTNDEKDEFLQATVKILQRINNNVIGAKLLSLISTAIPFPYEYKPGDYRQTNYLVSKDNQHYYTANLVIFGPGTNIVENNAVYYKKEDSENGMGTMSEIWFQPFLTYKYDQFYVDPALELIKCLIKSLYYLYGIKPSDDLSIPYRLRSELNSLKYSELDMVDFLISGGTDYKLLNTNPYWVTDNYFSDAPKNFEKYKNDYETKIKNNNDIANSIKLYLEQKFKINAQDIWELNLSYLSTEFEIMMPEIFNNALNHYHRKEYYVIDYFKNYNINGFINGQIKTILPLSKYNKNIINKPELIVNLINENNSVLMKSNVYGDGLKGTMNNFYAVYKIPYNIGDEYHINYSYLNNVNVEEINNIPPINDADIYPYRKNSDPFIPVYNITETKEINTTTPLSVNYLQAQVTNSNDINLSLDFSKVISLKDRSLVYSFLDNTIDYLDSIKYDEPINTDKKYYLWLKEIFRNYSFDMTEIQEVNIPCGINKVVPWLGKALNILNTGNSFIEEFKTLGPISLINKKENIIMPKIEIDEIPNSMLNLSFKDLSENLFNIFSKNNSYFEKIYYDFLDQWWTQYYSQYFDLICMAKRSVLAQESLIKKIIQKKLSYLIGNSNISADNLVLMNLTTTNTLRDISNESQIAMNNVDSFLNSAAICVFEGNIYPKFISFMEQCINNINKNTREFIQKCTNITENEKLQLINRNIFSSLDFDFLNIENLKSLFSSETALLIKEETSPYELVLYAFQEPDNNAIGDASAKNTSIEYSKDIDLVYGINGDALYLNGANQSISFSNDFFENGLTNSFSIYFWLRNLGKDTIKSKLIGSKEDNCGWEIYFQDTGLVFNMIDSNGNEKNIYLSDVSNNSWHYITISIDRLKEQLLIFIDDNLVVNESIKEILNIYSSNIISLLSNNNASYIEGLTILNKPTTSQEVLSNYFKNLNNSYIRDSNEERLEYNKTYQLYNYVFSENPIYEIKQNNNIYLTINNTNNLNLQASKFKLLSINPNKQHVQKFDEVIISILDNMEKYIDISEDNRLQLIDNKNGAKKMIISNNIFISNCLTLSCGGKYICLSMKDENYNWMICNNESNIPKKAYLWTLKEV

SEQ ID NO: 108 - protein, 1159 aa, Clostridium botulinum
MKINNNFNIDSLIDNRDVAIVRGRKTDTFFKVFQVAPNIWIAPERYYGESLNINEDQKSDGGIYDSNFLSTNDEKDEFLQATVKILQRINNNVIGAKLLSLISTAIPFPYEYKPGDYRQTNYLVSKDNQHYYTANLVIFGPGTNIVENNAIYYKKEDSENGMGTMSEIWFQPFLTYKYGQFYVDPALELIKCLIKSLYYLYGIKPSDDLSIPYRLRSELNSFEYSELDMIDFLISGGTEYKLLDTNPYWFTDNYFIDAPKNFEKYKNDYETKIKNNNDIANSIKLYLEQKFKTNAQDIWELNLSYFSTEFEIMMPEIFNNALNHYYRKEYYVIDYFKNYNINGFINGQIKTILPLSKYNKNIINKPELVVNLINENNTVLMKSNVYGDGLKGTMDNFYAAYKIPYNIGDEYHINYSYLNNVNVEEINNIPPINDADIYPYRKNSDPFIPVYNITETKEINTTTPLSVNYLQAQVTNSNDISLSSDFSKVISSKDRSLVYSFLDNTIDYLDSIKYDEPIDTDKKYYLWLKEIFRNYSFDMTETQEVNTPCGINKVVPWLGKALNILNTGNSFIEEFKSLGPISLINKKENITMPKIEIDEIPNSMLNLSFKDLSENLFNRFSKNNSYFEKIYYDFLDQWWTQYYSQYFDLICMAKKSILAQETLIKKIIQKKLSYLIGNSNISSDNLALMNLTTTNTLRDISNESQIAMNNVDSFLNSAAICVFEGNIYSKFISFMEQCINNINKNTREFIQKCTNITENEKLQLINQNIFSSLDFDFLNIENLKSLFSSETALLIKEETSPYELVLYAFQEPDNNAIGDASAKNTSIEYSKDIDLVYGINSDALYLNGSNQSISFSNDFFENGLTNSFSIYFWLRNLGKDTIKYKLIGSKEDNCGWEIYFQDTGLVFNMIDSNGNEKNIYLSDVSNNSWHYITISVDRLKEQLLIFIDDNLVANESIKEILNIYSSNIISLLSENKPSYIEGLTILNKPTTSQEVLNNYFKVLNNSYIRDSNEERLEYHKTYQLDNYVFSDKPICEVKQNNNIYLTINNTNNLNLQPSKFKLLSINSNKQYVQKFDEVIISILGNMEKYIDISEDNRLQLIDNKNGAKKMIISNDMFISNCLTLSCGGKYICLSMKDENHNWMICNNDMSKYLYLWSFK

SEQ ID NO: 109 - protein, 1165 aa, Clostridium botulinum
MKINDDLNINSPVDNKNVVIVRARKTNIFFKAFQVAPNIWVAPERYYGEPLNISDQEKSDGGIYDENFLKENSEKEEFLQAIILLLKRINNNIIGQKLLSLMCTSIPFLHEYKQGDYRQSNYLGSKNSEYLYSANIVIFGPGSNIVKNNTIYYKKNFAENGMGTMAEILFQPLLTYKYNQFYADPALELIKCLIKAIYFLYGIKPNDNLNIPYRLRNEFSNVEYSELNIIDFLISGGIDYKFINTNPYWFIDNYFIDVPKVFEKHKNDYEINIKNNSEIGTSIKLYLEQKFKTNVQDIWELNLSYFSKEFQIMMPEKHNNALKHYYRKEYYKINYSKQYDINGFVNGQIATKLLLSEKNQYIINKPQLIINLINKSNNSLLMKSNIYGDGLNGTTDNFYRNYKIPDNIAYQYHPNNTYLDNVNIEEINNIPQITDADIYPYTNNCDTFIPIYNITQSREINTTVPYSINYLQSQIMNSDDITLSSDFWEVVCSNDKSLVYSYLDNVINYLDSIKNNTPINTDKKYYLWLKEIFRNYSFDITATEEITTECGINKIVSWFGKALNILNTDNSFKIEFQNSGAIALINKKDNIIIPKIEIDEMPNSMLNLSFEDLNEQLYSIYSKNITYFKKIYYNFLDQWWTEYYSQYFDLICMAKKSILAQENLIKKIIQKKISYLIGASNIPDDILAVMRLTTTNTLRDISVESQIAMNNLNNFLNKAAMCVFQSNIYPKFISFMEQCIKHINKSTKEFIQKCTNINETEKLQLIMQNSFSNLDFDFLDIQNMKNLFNSYTELLIKEQTSPYELSLYAFEEQDNNVIGDASGKNTLVEYPKGIELVYGINNSALYLNGSNQSIIFTNDYFENGLTNSFSIYFWLRNLGQDTIKSKLIGSKEYNCGWEIYFQEIGHVFNMIDSNGNEKNIYLSDVSNNSWHYITISVDRLKEQLLIFIDDNLVVNESIKDILNIYSSNIISLLSDNKASYIEGLTILNKPTTGEEVLRNYFKNLNNSYVRDSNDERLEYNKTYQLYDYVFPDNPICEVKQDNNIYLTINNINNLNMKPCKFKLLSINSNKQYVQKWDEVIISVLYDTEKYVCISNENNRVKIIDNKIMQVKFIISNDIFISNCLTHAHNNKYICLSMKDENYNWMICNNESNIPKKAYLWILKEV

SEQ ID NO: 110 - protein, 1165 aa, Clostridium botulinum
MKINDDLNINSPVDNKNVVIVRARKTNIFFKAFQVAPNIWVAPERYYGEPLNISDQEKSDGGIYDENFLKENSEKEEFLQAIILLLKRINNNIIGQKLLSLMCTSIPFLHEYKQGDYRQSNYLGSKNSEYLYSANIVIFGPGSNIVKNNTIYYKKNFAENGMGTMAEILFQPFLTYKYNQFYADPALELIKCLIKAIYFLYGIKPNDNLNIPYRLRNEFSNVEYSELNIIDFLISGGIDYKFINTNPYWFIDNYFIDVPKVFEKHKNDYEINIKNNSEIGTSIKLYLEQKFKTNVQDIWELNLSYFSKEFQIMMPEKHNNALKHYYRKEYYKINYSKQYDINGFVNGQIATKLLLSEKNQYIINKPQLIINLINKSNNSLLMKSNIYGDGLNGTTDNFYRNYKIPDNIAYQYHPNNTYLDNVNIEEINNIPQITDADIYPYTNNCDTFIPIYNITQSREINTTVPYSINYLQSQIMNSDDITLSSDFWEVVCSNDKSLVYSYLDNVINYLDSIKNNTPINTDKKYYLWLKEIFRNYSFDITATEEITTECGINKIVSWFGKAFNILNTDNSFKIEFQNSGAIALINKKDNIIIPKIEIDEMPNSMLNLSFEDLNEQLYSIYSKNITYFKKIYYNFLDQWWTEYYSQYFDLICMAKKSILAQENLIKKIIQKKISYLIGASNIPDDILAVMRLTTTNTLRDISVESQIAMNNLNNFLNKAAMCVFQSNIYPKFISFMEQCIKHINKSTKEFIQKCTNINETEKLQLIMQNSFSNLDFDFLDIQNMKNLFNSYTELLIKEQTSPYELSLYAFEEQDNNVIGDASGKNTLVEYPKGIELVYGINNSALYLNGSNQSIIFTNDYFENGLTNSFSIYFWLRNLGQDTIKSKLIGSKEYNCGWEIYFQEIGHVFNMIDSNGNEKNIYLSDVSNNSWHYITISVDRLKEQLLIFIDDNLVVNESIKDILNIYSSNIISLLSDNKASYIEGLTILNKPTTGEEVLRNYFKNLNNSYVRDSNDERLEYNKTYQLYDYVFPDNPICEVKQDNNIYLTINNINNLNMKPCKFKLLSINSNKQYVQKWDEVIISVLYDTEKYVCISNENNRVKIIDNKIMQVKFIISNDIFISNCLTHAHNNKYICLSMKDENYNWMICNNESNIPKKAYLWILKEV

SEQ ID NO: 111 - protein, 1162 aa, Clostridium botulinum
MKINNNFNINSLVDNRDVAIVRGRKTDALFKVFQVAPNIWIAPERYYGESLNINEDQKSDGGIYDSSFLSTDNEKDEFLQATVKILQRINNNVIGAKLLSLISTAISFPYEYKPGDYRQTNYLTSKYNEHYYTANLVIFGPGSNIIKNNVVYYKKEYAENGMGTMSEIWFQPFLTYKYDQFYVDPALELIKCLIKSLYYLYGIKPSDDLSIPYRLRSELNNSEYSQLDIVDFLISGGTDYKLLNTNPYWITDNYFSDAPKNFEKYKNDYETKIKNNNDIANSIKLYLEQKFKINAQNIWELNLSYFSKEFQIMMPERYNNALNHYYKKEYYGIDYFRNYNINGFEKGQIKTNLPLSKYNKCIINKPELIVNLINQNNTVWMKSNIYGDGLKCTIDNFYSSYKIPYNANYEHPINYSYLDNVNIEEIDKIPPINDADIYPYRKNADTFIPVYNIIKSKEVNTTTPLPVNYLQVQITDSNDINLSSDFLEVISSKGSSVYSFLNNTMDYLESIKYDKPIDTDKKYYKWLKAIFRNYSFDITETQEISNQFGVTKIVPWIGRALNILNTNNSFMEEFKNLGPISLINKKENITMPKIEIDEIPNSMLNLSFKDLSENLFNISFKSNSYFKKIYYDFLDQWWTQYYSQYFDLICMAKKSILAQEKLIKKIIRKKLSYLIGNANISSDNLALMNLTTTNTLRDISNESQIAMNNVDSFLNDAAICVFESNIYPKFISFMEQCINNINKDTKEFIQKCTNITENEKLQLISPNIFSSLDFDFLNIENLKSLLSSETALLIKEETSPYELVLYAFQELSNNVIGDASGKNTSIEYSKDIGLVYGINSDALYLNGSNQSISFSNDFFENGLTNSFSIHFWLRNLGQDTTKSKLIGSKEDNCGWEIYFQNTGLVFNMIDSNGDEKNIYLSDVSNNSWHYITISVDRLKEQLLIFIDDNLVVNESIKEILNIYSSNIISLLSDNNASYIEGLTILNKPTTGEEVLSNYFKNLNNSYIRDSNEERLEYNKTYQLYNYVFSDKPICEVKQNNNIYLTINNTNNLNLQASKFKLLSINPNKQYVQKFDEVIISVLDNMEKYIDISEDNRLQLIDNKNSAKKMIISNDIFISNCLTLSYGDKYVCLSMKDENYNWMICNNESNIPKKAYLWILKEV

SEQ ID NO: 112 - protein, 1160 aa, Clostridium barati
MKINNNFNIDSPVDNKNVAVVRGRKTDSFFKAFQVAPNIWIAPERYYGESLNINEDQKSDGGIYDSNFLSTDDEKDEFLQATIKILQRINNNIVGEKLLSLIATAMPFPYEYGAEDFRQTNYLSSKDNKYYYPANLVIFGPGSNLIENSVVCYKKEYSENGMGTMCEVWFQPFLTYKYDQFYNDPALELIKCLIKSLYYLYGIKPSDDLSIPYRLRSEFNYLEYSELDIIDFLISGGNDYKFLNTNPYWLTSDYFINASKNFEKYKNYYETKVKNNNDISNSIKLYLEQKFKTNVQDIWELNLSYFSKEFQIMMPERYNNALNHYYKKEYYMIDYFKNYNISGFVNGQINTRLPLSKYNKDIISKPELIVNLINENNTILMKSNIYGDGLKDTRTNFYSNYKIPYSTNYEYQINHSYLNNVNIEEISNIPPIDDKDIYPYRKNADSFIPVYSIASTKEITTTPLPINYLQAQMTNNNIKLSLDFLEVISSKGSLVYSFLNNTIDYLDSIKYDKPINTAERYYEWLKSIFRNYSFDITETQEINTSCGTTKVVPWIGKALNILNTNNSFVEEFEKLGPISLINKKENITMPKIEIDEIPNSMLNLSFNDLSNNLFNIYAKNNSYFKKIYYNFLDQWWTQYYSQYFYLICMGKKSVLAQEKLIKEIIQKQLNYLIRNSNISSSDLALMNLTTTNTLRDISNKSQIAMNNIDDFFNNAAICVFQSNIYPKFISFMQQCINGINENTKYFIQKCTNVTEDEKLQLIMQNSLNSLNFDFLDIEKIKCLFNSYTRLLIKKQSSPYELSLYAFQGEDKNVIGDGSGKNTLVEYTNDIGLIYGINNNALYLNQSNQSVSFTNDYFENGLTNSFSIYFWLRNLGKDIIKSKLISSKLDNCGWEIYLEDNGLVFNIIDSNGSYKKIYISDMNNSWNYIAISVDRLKEQLLIFVNDVLVANEDIKDILNIYSSNTISLVSENNQICIEGLSILNTNITKEEVLNNYFADLNNSYIRNGNEERLEYNKKYNLFNYVFSKTPICKVNHNNKIYLSINNDDNLNVKPLSFMLLSVDSNKKYVQKCDEVIISILDDKERYLCKSNEDNRIEIVDNKSSANIFIINNDIFISNCLTLKFNNKFIYLSEKYMNYNWIECENKYTIPKKAYLWILKNI

SEQ ID NO: 113 - protein, 1162 aa, Clostridium botulinum
MKINGNLNIDSPVDNKNVAIVRSRNQMFFKAFQVAPNIWIVPERYYGESLKINEDQKFDGGIYDSNFLSTNNEKDDFLQATIKLLQRINNNVVGAKLLSLISTAIPFPYENNTEDYRQTNYLSSKNNEHYYTANLVIFGPGSNIIKNNVIYYKKEYAESGMGTMLEIWFQPFLTHKYDEFYVDPALELIKCLIKSLYYLYGIKPNDNLNIPYRLRNEFNSLEYSELNMIDFLISGGIDYKLLNTNPYWFIDKYFIDTSKNFEKYKNDYEIKIKNNNYIANSIKLYLEQKFKINVKDIWELNLSYFSKEFQIMMPERYNNALNHYYRKEFYVIDYFKNYNINGFKNGQIKTKLPLSKYNKEIINKPELIVNLINQNNTVLMKSNIYGDGLKGTVDNFYSNYIIPYNLNYEHSINYFYLDNVNIEEIEKIPPINDEDIYPYRKNADTFIPVYNITKAKEINTTTPLPVNYLQAQMIDSNDINLSSDFLKVISSKGSLVYSFLNNTMDYLEFIKYDKPIDTDKKYYKWLKAIFRNYSLDITETQEISNQFGDTKIIPWIGRALNILNTNNSFVEEFKNLGPISLINKKENITIPKIKIDEIPSSMLNFSFKDLSENLFNIYCKNNFYLKKIYYNFLDQWWTQYYSQYFDLICMASKSVLAQEKLIKKLIQKQLRYLMENSNISSTNLILINLTTTNTLRDISNQSQIAINNIDKFFNNAAMCVFENNIYPKFTSFMEQCIKNINKSTKEFILKCTNINETEKSHLIMQNSFSNLDFDFLDIQNMKNLFNLYTELLIKEQTSPYELSLYAFQEQDNNVIGDTSGKNTLVEYPKDIGLVYGINNNAIHLTGANQNIKFTNDYFENGLTNNFSIYFWLRNLKQNTIKSKLIGSKEDNCGWEIYFENDGLVFNIIDSNGNEKNIYLSNISNKSWHYIVISINRLKDQLLIFIDNILVANEDIKEILNIYSSDIISLLSDNNNVYIEGLSVLNKTINSNEILTDYFSDLNNSYIRNFDEEILQYNRTYELFNYVFPEIAINKIEQNNNIYLSINNENNLNFKPLKFKLLNTNPNKQYVQKWDEVIFSVLDGTEKYLDISTTNNRIQLVDNKNNAQIFIINNDIFISNCLTLTYNNVNVYLSIKNQDYNWVICDLNHDIPKKSYLWILKNI

SEQ ID NO: 114 - protein, 1162 aa, Clostridium botulinum
MKINGNLNIDSPVDNKNVAIVRSRNQMFFKAFQVAPNIWIVPERYYGESLKINEDQKFDGGIYDSNFLSTNNEKDDFLQATIKLLQRINNNVVGAKLLSLISTAIPFPYENNTEDYRQTNYLSSKNNEHYYTANLVIFGPGSNIIKNNVIYYKKEYAESGMGTMLEIWFQPFLTHKYDEFYVDPALELIKCLIKSLYYLYGIKPNDNLNIPYRLRNEFNSLEYSELNMIDFLISGGIDYKLLNTNPYWFIDKYFIDTSKNFEKYKNDYEIKIKNNNYIANSIKLYLEQKFKINVKDIWELNLSYFSKEFQIMMPERYNNALNHYYRKEFYVIDYFKNYNINGFKNGQIKTKLPLSKYNKEIINKPELIVNLINQNNTVLMKSNIYGDGLKGNVDNFYSNYIIPYNLNYEHSINYFYLDNVNIEEIEKIPPINDEDIYPYRKNADTFIPVYNITKAKEINTTTPLPVNYLQAQMIDSNDINLSSDFLKVISSKGSLVYSFLNNTMDYLEFIKYDKPIDTDKKYYKWLKAIFRNYSLDITETQEISNQFGDTKIIPWIGRALNILNTNNSFVEEFKNLGPISLINKKENITIPKIKIDEIPSSMLNFSFKDLSENLFNIYCKNNFYLKKIYYNFLDQWWTQYYSQYFDLICMASKSVLAQEKLIKKLIQKQLRYLMENSNISSTNLILINLTTTNTLRDISNQSQIAINNIDKFFNNAAMCVFENNIYPKFTSFMEQCIKNINKSTKEFILKCTNINETEKSHLIMQNSFSNLDFDFLDIQNMKNLFNLYTELLIKEQTSPYELSLYAFQEQDNNVIGDTSGKNTLVEYPKDIGLVYGINNNAIHLTGANQNIKFTNDYFENGLTNNFSIYFWLRNLKQNTIKSKLIGSKEDNCGWEIYFENDGLVFNIIDSNGNEKNIYLSNISNKSWHYIVISINRLKDQLLIFIDNILVANEDIKEILNIYSSDIISLLSDNNNVYIEGLSVLNKTINSNEILTDYFSDLNNSYIRNFDEEILQYNRTYELFNYVFPEIAINKIEQNNNIYLSINNENNLNFKPLKFKLLNTNPNKQYVQKWDEVIFSVLDGTEKYLDISTTNNRIQLVDNKNNAQIFIINNDIFISNCLTLTYNNVNVYLSIKNQDYNWVICDLNHDIPKKSYLWILKNI

SEQ ID NO: 115 - protein, 1162 aa, Clostridium butyricum
MKINGNLNIDSPVDNKNVAIVRSRNQMFFKAFQVAPNIWIAPERYYGESLKINEDQKSDGGIYDSNFLSTNNEKDEFLQATIKLLQRINNNVVGAKLLSLISTAIPFPYENNTEDYRQTNYLSSKNNEHYYTANLVIFGPGSNIIKNNVIYYKKEYAENGMGTMLEIWFQPFLTHKYDEFYVDPALELIKCLIKSLYYLYGIKPNDNLNIPYRLRNEFNSLEYSELDMIDFLISGGIDYKLLNTNPYWFIDKYFIDTSKNFEKYKNDYEIKIKNNNYIANSIKLYLEQKFKINVKDIWELNLSYFSKEFQIMMPERYNNALNHYYRKEFYVIDYFKNYNINGFKNGQIKTKLPLSKYNKEIINKPELIVNLINQNNTVLMKSNFYGDGLKGNVDNFYSNYIIPYNLNYEHSINYSYLDNVNIEEIEKIPPINDEDIYPYRKNADTFIPVYNITKAKEINTTTPLPVNYLQAQMIDSNDINLSSDFLKVISSKGSLVYSFLNNTMDYLEFIKYDKPIDTDKKYYKWLKAIFRNYSLDITETQEISNQFGDTKIIPWIGRALNILNTNNSFVEEFKNLGPIFLINKKENITIPKIKIDEIPSSMLNFSFKDLSENLFNIYCKNNFYLKKIYYNFLDQWWTQYYSQYFDLICMASKSVLAQEKLIKKLIQKQLRYLMENSNISSTNLILINLTTTNTLRDISNQSQIAINNIDKFFNNAAMCVFENNIYPKFTSFMEQCIKNINKSTKEFILKCTNINETEKSHLIMQNSFSNLDFDFLDIQNMKNLFNLYTELLIKEQTSPYELSLYAFQEQDNNVIGDTSGKNTLVEYPKDIGLVYGINNNAIHLTGANQNIKFTNDYFENGLTNNFSIYFWLRNLNQNTIKSKLIGSKEDNCGWEIYFENNGLVFNIIDSNGNEKNIYLSNISNKSWHYIVISINRLKDQLLIFIDNILVANEDIKEILNIYSSDIISLLSDNNNVYIEGLSVLNKTINSNEILTDYFSDLNNSYIRNFDEEILQYNRTYELFNYVFPEIAINKIEQNNNIYLSNNNENSLNFKPLKFKLLNTNPNKQYVQKWDEVIFSVLDGTEKYLDISIDNNRIQLVDNKNNAKTFIINNDIFISNCLTLTYNNVNVYLSIKNQDYNWVICDLNHDIPKKSYLWILKNI

SEQ ID NO: 116 - protein, 197 aa, Clostridium botulinum
MNINDNLSINSPVDNKNVVVVRARKTDTVFKAFKVAPNIWVAPERYYGESLSIDEEYKVDGGIYDSNFLSQDSEKDKFLQAIITLLKRINSTNAGEKLLSLISTAIPFPYGYIGGGYYAPNMITFGSAPKSNKKLNSLISSTIPFPYAGYRETNYLSSEDNKSFYASNIVIFGPGANIVENNTVFYKKEDAENGMGT

SEQ ID NO: 117 - protein, 1291 aa, Clostridium botulinum
MPVTINNFNYNDPIDNDNIIMMEPPFARGTGRYYKAFKITDRIWIIPERYTFGYKPEDFNKSSGIFNRDVCEYYDPDYLNTNDKKNIFFQTLIKLFNRIKSKPLGEKLLEMIINGIPYLGDRRVPLEEFNTNIASVTVNKLISNPGEVERKKGIFANLIIFGPGPVLNENETIDIGIQNHFASREGFGGIMQMKFCPEYVSVFNNVQENKGASIFNRRGYFSDPALILMHELIHVLHGLYGIKVDDLPIVPNEKKFFMQSTDTIQAEELYTFGGQDPSIISPSTDKSIYDKVLQNFRGIVDRLNKVLVCISDPNININIYKNKFKDKYKFVEDSEGKYSIDVESFNKLYKSLMLGFTEINIAENYKIKTRASYFSDSLPPVKIKNLLDNEIYTIEEGFNISDKNMGKEYRGQNKAINKQAYEEISKEHLAVYKIQMCKSVKVPGICIDVDNENLFFIADKNSFSDDLSKNERVEYNTQNNYIGNDFPINELILDTDLISKIELPSENTESLTDFNVDVPVYEKQPAIKKVFTDENTIFQYLYSQTFPLNIRDISLTSSFDDALLVSSKVYSFFSMDYIKTANKVVEAGLFAGWVKQIVDDFVIEANKSSTMDKIADISLIVPYIGLALNVGDETAKGNFESAFEIAGSSILLEFIPELLIPVVGVFLLESYIDNKNKIIKTIDNALTKRVEKWIDMYGLIVAQWLSTVNTQFYTIKEGMYKALNYQAQALEEIIKYKYNIYSEEEKSNININFNDINSKLNDGINQAMDNINDFINECSVSYLMKKMIPLAVKKLLDFDNTLKKNLLNYIDENKLYLIGSVEDEKSKVDKYLKTIIPFDLSTYSNIEILIKIFNKYNSEILNNIILNLRYRDNNLIDLSGYGAKVEVYDGVKLNDKNQFKLTSSADSKIRVTQNQNIIFNSMFLDFSVSFWIRIPKYRNDDIQNYIHNEYTIINCMKNNSGWKISIRGNRIIWTLIDINGKTKSVFFEYNIREDISEYINRWFFVTITNNLDNAKIYINGTLESNMDIKDIGEVIVNGEITFKLDGDVDRTQFIWMKYFSIFNTQLNQSNIKEIYKIQSYSEYLKDFWGNPLMYNKEYYMFNAGNKNSYIKLVKDSSVGEILIRSKYNQNSNYINYRNLYIGEKFIIRRESNSQSINDDIVRKEDYIHLDLVLHHEEWRVYAYKYFKEQEEKLFLSIISDSNEFYKTIEIKEYDEQPSYSCQLLFKKDEESTDDIGLIGIHRFYESGVLRKKYKDYFCISKWYLKEVKRKPYKSNLGCNWQFIPKDEGWTE

SEQ ID NO: 118 - protein, 1291 aa, Clostridium botulinum; identical to SEQ ID NO: 2

SEQ ID NO: 119 - protein, 1290 aa, Clostridium botulinum
PVTINNFNYNDPIDNNNIIMMEPPFARGTGRYYKAFKITDRIWIIPERYTFGYKPEDFNKSSGIFNRDVCEYYDPDYLNTNDKKNIFLQTMIKLFNRIKSKPLGEKLLEMIINGIPYLGDRRVPLEEFNTNIASVTVNKLISNPGEVERKKGIFANLIIFGPGPVLNENETIDIGIQNHFASREGFGGIMQMKFCPEYVSVFNNVQENKGASIFNRRGYFSDPALILMHELIHVLHGLYGIKVDDLPIVPNEKKFFMQSTDAIQAEELYTFGGQDPSIITPSTDKSIYDKVLQNFRGIVDRLNKVLVCISDPNININIYKNKFKDKYKFVEDSEGKYSIDVESFDKLYKSLMFGFTETNIAENYKIKTRASYFSDSLPPVKIKNLLDNEIYTIEEGFNISDKDMEKEYRGQNKAINKQAYEEISKEHLAVYKIQMCKSVKAPGICIDVDNEDLFFIADKNSFSDDLSKNERIEYNTQSNYIENDFPINELILDTDLISKIELPSENTESLTDFNVDVPVYEKQPAIKKIFTDENTIFQYLYSQTFPLDIRDISLTSSFDDALLFSNKVYSFFSMDYIKTANKVVEAGLFAGWVKQIVNDFVIEANKSNTMDKIADISLIVPYIGLALNVGNETAKGNFENAFEIAGASILLEFIPELLIPVVGAFLLESYIDNKNKIIKTIDNALTKRNEKWSDMYGLIVAQWLSTVNTQFYTIKEGMYKALNYQAQALEEIIKYRYNIYSEKEKSNINIDFNDINSKLNEGINQAIDNINNFINGCSVSYLMKKMIPLAVEKLLDFDNTLKKNLLNYIDENKLYLIGSAEYEKSKVNKYLKTIMPFDLSIYTNDTILIEMFNKYNSEILNNIILNLRYKDNNLIDLSGYGAKVEVYDGVELNDKNQFKLTSSANSKIRVTQNQNIIFNSVFLDFSVSFWIRIPKYKNDGIQNYIHNEYTIINCMKNNSGWKISIRGNRIIWTLIDINGKTKSVFFEYNIREDISEYINRWFFVTITNNLNNAKIYINGKLESNTDIKDIREVIANGEIIFKLDGDIDRTQFIWMKYFSIFNTELSQSNIEERYKIQSYSEYLKDFWGNPLMYNKEYYMFNAGNKNSYIKLKKDSPVGEILTRSKYNQNSKYINYRDLYIGEKFIIRRKSNSQSINDDIVRKEDYIYLDFFNLNQEWRVYTYKYFKKEEEKLFLAPISDSDEFYNTIQIKEYDEQPTYSCQLLFKKDEESTDEIGLIGIHRFYESGIVFEEYKDYFCISKWYLKEVKRKPYNLKLGCNWQFIPKDEGWTE

SEQ ID NO: 120 - protein, 90 aa, Clostridium botulinum D phage
MDINDDLNINSPVDNKNVVIVRARKTNTFFKAFKVAPNIWVAPERYYGEPLDIAEEYKLDGGIYDSNFLSQDSERENFLQAIIILLKRIN

SEQ ID NO: 121 - protein, 1291 aa, Clostridium botulinum
MPVTINNFNYNDPIDNNNIIMMEPPFARGMGRYYKAFKITDRIWIIPERYTFGYKPEDFNKSSGIFNRDVCEYYDPDYLNTNDKKNIFLQTMIKLFNRIKSKPLGEKLLEMIINGIPYLGDRRVPLEEFNTNIASVTVNKLISNPGEVERKKGIFANLIIFGPGPVLNENETIDIGIQNHFASREGFGGIMQMKFCPEYVSVFNNVQENKGASIFNRRGYFSDPALILMHELIHVLHGLYGIKVNDLPIVPNEKKFFMQSTDAIQAEELYTFGGQDPSIISPSTDKSIYDKVLQNFRGIVDRLNKVLVCISDPNININIYKNKFKDKYKFVEDSEGKYSIDVESFDKLYKSLMFGFTETNIAENYKIKTRASYFSDSLPPVKIKNLLDNEIYTIEEGFNISDKNMEKEYRGQNKAINKQAYEEISKEHLAVYKIQMCKSVKAPGICIDVDNEDLFFIADKNSFSDDLSKNERIAYNTQNNYIENDFSINELILDTDLISKIELPSENTESLTDFNVYVPVYKKQPAIKKIFTDENTIFQYLYSQTFPLDIRDISLTSSFDDALLFSNKVYSFFSMDYIKTANKVVEAGLFAGWVKQIVNDFVIEANKSSTMDKIADISLIVPYIGLALNVGNETAKGNFENAFEIAGASILLEFIPELLIPVVGAFLLESYIDNKNKIIETINSALTKRDEKWIDMYGLIVAQWLSTVNTQFYTIKEGMYKALNYQAQALEEIIKYKYNIYSEKERSNINIDFNDVNSKLNEGINQAIDNINNFINECSVSYLMKKMIPLAVEKLLDFDNTLRKNLLNYIDENKLYLIGSAEYEKSKVDKYLKTSIPFDLSTYTNNTILIEIFNKYNSDILNNIILNLRYRDNKLIDLSGYGAKVEVYDGVKLNDKNQFKLTSSANSKIRVTQNQNIIFNSMFLDFSVSFWIRIPKYKNDGIQNYIHNEYTIINCMKNNSGWKISIRGNMIIWTLIDINGKIKSVFFEYSIKEDISEYINRWFFVTITNNSDNAKIYINGKLESHIDIRDIREVIANDEIIFKLDGNIDRTQFIWMKYFSIFNTELSQSNIEEIYKIQSYSEYLKDFWGNPLMYNKEYYMFNAGNKNSYIKLKKDSSVGEILTRSKYNQNSKYINYRDLYIGEKFIIRRKSNSQSINDDIVRKEDYIYLDFFNLNQEWRVYMYKYFKKEEEKLFLAPISDSDEFYNTIQIKEYDEQPTYSCQLLFKKDEESTDEIGLIGIHRFYESGIVFKEYKDYFCISKWYLKEVKRKPYNSKLGCNWQFIPKDEGWTE

SEQ ID NO: 122 - protein, 1291 aa, Clostridium botulinum
MSVTINNFNYNDPIDNDNIIMMEPPFARGTGRYYKAFKITDRIWIIPERYTFGYKPEDFNKSSGIFNRDVCEYYDPDYLNTNDKKNIFLQTMIKLFNRIKSKPLGEKLLEMIINGIPYLGDRRVPLEEFNTNIASVTVNKLISNPGEVERKKGIFANLIIFGPGPVLNENETIDIGIQNHFASREGFGGIMQMKFCPEYVSVFNNVQENKGASIFNRRGYFSDPALILMHELIHVLHGLYGIKVNDLPIVPNEKKFFMQSTDAIQAEELYTFGGQDPSIISPSTDKSIYDKVLQNFRGIVDRLNKVLVCISDPNININIYKNKFKDKYKFVEDSEGKYSIDVESFDKLYKSLMFGFTETNIAENYKIKTRASYFSDSLPPVKIKNLLDNEIYTIEEGFNISDKNMEKEYRGQNKAINKQAYEEISKEHLAVYKIQMCKSVKAPGICIDVDNEDLFFIADKNSFSDDLSKNERIAYNTQNNYIDNDFSINELILDTDLISKIELPSENTESLTDFNVYVPEYKKQPAIKKIFTDENTIFQYLYSQTFPLDIRDISLTSSFDDALLFSNKVYSFFSMDYIKTANKVVEAGLFAGWVKQIVDDFVIEANKSSTMDKIADISLIVPYIGLALNVGNETAKGNFENAFEIAGASILLEFIPELLIPVVGAFLLESYIDNKNKIIETINSALTKRDEKWIDMYGLIVAQWLSTVNTQFYTIKEGMYKALNYQAQALEEIIKYKYNIYSEKERSNINIDFNDVNSKLNEGINQAIDNINNFINECSVSYLMKKMIPLAVEKLLDFDNTLRKNLLNYIDENKLYLIGSAEYEKSKVDKYLKTSIPFDLSTYTNNTILIEIFNKYNSDILNNIILNLRYRDNKLIDLSGYGAKVEVYDGVKLNDKNQFKLTSSANSKIRVIQNQNIIFNSMFLDFSVSFWIRIPKYKNDGIQNYIHNEYTIINCMKNNSGWKISIRGNMIIWTLIDINGKIKSVFFEYSIKEDISEYINRWFFVTITNNSDNAKIYINGKLESHIDIRDIREVIANDEIIFKLDGNIDRTQFIWMKYFSIFNTELSQSNIEEIYKIQSYSEYLKDFWGNPLMYNKEYYMFNAGNKNSYIKLKKDSPVGEILTRSKYNQNSKYINYRDLYIGEKFIIRRKSNSQSINDDIVRKEDYIYLDFFNLNQEWRVYIYKYFKKEEEKLFLAPISDSDEFYNTIQIKEYDEQPTYSCQLLFKKDEESTDEIGLIGIHRFYESGIVFKEYKDYFCISKWYLKEVKRKPYNSKLGCNWQFIPKDEGWTE

SEQ ID NO: 123 - protein, 1291 aa, Clostridium botulinum
MPVTINNFNYNDPIDNNNIIMMEPPFARGMGRYYKAFKITDRIWIIPERYTFGYKPEDFNKSSGIFNRDVCEYYDPDYLNTNDKKNIFLQTMIKLFNRIKSKPLGEKLLEMIINGIPYLGDRRVPLEEFNTNIASVTVNKLISNPGEVERKKGIFANLIIFGPGPVLNENETIDIGIQNHFASREGFGGIMQMKFCPEYVSVFNNVQENKGASIFNRRGYFSDPALILMHELIHVLHGLYGIKVNDLPIVPNEKKFFMQSTDAIQAEELYTFGGQDPSIISPSTDKSIYDKVLQNFRGIVDRLNKVLVCISDPNININIYKNKFKDKYKFVEDSEGKYSIDVESFDKLYKSLMFGFTETNIAENYKIKTRAAYFSDSLPPVKIKNLLDNEIYTIEEGFNISDKNMEKEYRGQNKAINKQAYEEISKEHLAVYKIQMCKSVKAPGICIDVDNEDLFFIADKNSFSDDLSKNERIAYNTQNNYIENDFSINELILDTDLISKIELPSENTESLTDFNVYVPVYKKQPAIKKIFTDENTIFQYLYSQTFPLDIRDISLTSSFDDALLFSNKVYSFFSMDYIKTANKVVEAGLFAGWVKQIVDDFVIEANKSSTMDKIADISLIVPYIGLALNVGNETAKGNFENAFEIAGASILLEFIPELLIPVVGAFLLESYIDNKNKIIETINSALTKRDEKWIDMYGLIVAQWLSTVNTQFYTIKEGMYKALNYQAQALEEIIKYKYNIYSEKERSNINIDFNDVNSKLNEGINQAIDNINNFINECSVSYLMKKMIPLAVEKLLDFDNTLRKNLLNYIDENKLYLIGSAEYEKSKVDKYLKTSIPFDLSTYTNNTILIEIFNKYNSDILNNIILNLRYRDNKLIDLSGYGAKVEVYDGVKLNDKNQFKLTSSANSKIRVIQNQNIIFNSMFLDFSVSFWIRIPKYKNDGIQNYIHNEYTIINCMKNNSGWKISIRGNMIIWTLIDINGKIKSVFFEYSIKEDISEYINRWFFVTITNNSDNAKIYINGKLESHIDIRDIREVIANDEIIFKLDGNIDRTQFIWMKYFSIFNTELSQSNIEEIYKIQSYSEYLKDFWGNPLMYNKEYYMFNAGNKNSYIKLKKDSSVGEILTRSKYNQNSKYINYRDLYIGEKFIIRRKSNSQSINDDIVRKEDYIYLDFFNLNQEWRVYMYKYFKKEEEKLFLAPISDSDEFYNTIQIKEYDEQPTYSCQLLFKKDEESTDEIGLIGIHRFYESGIVFKEYKDYFCISKWYLKEVKRKPYNSKLGCNWQFIPKDEGWTE

SEQ ID NO: 124 - protein, 1251 aa, Clostridium butyricum; identical to SEQ ID NO: 5

SEQ ID NO: 125 - protein, 1252 aa, Clostridium butyricum
MPTINSFNYNDPVNNRTILYIKPGGCQQFYKSFNIMKNIWIIPERNVIGTIPQDFLPPTSLKNGDSSYYDPNYLQSDQEKDKFLKIVTKIFNRINDNLSGRILLEELSKANPYLGNDNTPDGDFIINDASAVPIQFSNGSQSILLPNVIIMGAEPDLFETNSSNISLRNNYMPSNHGFGSIAIVTFSPEYSFRFKDNSMNEFIQDPALTLMHELIHSLHGLYGAKGITTKYTITQKQNPLITNIRGTNIEEFLTFGGTDLNIITSAQSNDIYTNLLADYKKIASKLSKVQVSNPLLNPYKDVFEAKYGLDKDASGIYSVNINKFNDIFKKLYSFTEFDLATKFQVKCRQTYIGQYKYFKLSNLLNDSIYNISEGYNINNLKVNFRGQNANLNPRIITPITGRGLVKKIIRFCKNIVSVKGIRKSICIEINNGELFFVASENSYNDDNINTPKEIDDTVTSNNNYENDLDQVILNFNSESAPGLSDEKLNLTIQNDAYIPKYDSNGTSDIEQHDVNELNVFFYLDAQKVPEGENNVNLTSSIDTALLEQPKIYTFFSSEFINNVNKPVQAALFVGWIQQVLVDFTTEANQKSTVDKIADISIVVPYIGLALNIGNEAQKGNFKDALELLGAGILLEFEPELLIPTILVFTIKSFLGSSDNKNKVIKAINNALKERDEKWKEVYSFIVSNWMTKINTQFNKRKEQMYQALQNQVNALKAIIESKYNSYTLEEKNELTNKYDIEQIENELNQKVSIAMNNIDRFLTESSISYLMKLINEVKINKLREYDENVKTYLLDYIIKHGSILGESQQELNSMVIDTLNNSIPFKLSSYTDDKILISYFNKFFKRIKSSSVLNMRYKNDKYVDTSGYDSNININGDVYKYPTNKNQFGIYNDKLSEVNISQNDYIIYDNKYKNFSISFWVRIPNYDNKIVNVNNEYTIINCMRDNNSGWKVSLNHNEIIWTLQDNSGINQKLAFNYGNANGISDYINKWIFVTITNDRLGDSKLYINGNLIDKKSILNLGNIHVSDNILFKIVNCSYTRYIGIRYFNIFDKELDETEIQTLYNNEPNANILKDFWGNYLLYDKEYYLLNVLKPNNFINRRTDSTLSINNIRSTILLANRLYSGIKVKIQRVNNSSTNDNLVRKNDQVYINFVASKTHLLPLYADTATTNKEKTIKISSSGNRFNQVVVMNSVGNNCTMNFKNNNGNNIGLLGFKADTVVASTWYYTHMRDNTNSNGFFWNFISEEHGWQEK

SEQ ID NO: 126 - protein, 1255 aa, Clostridium butyricum
MLYMPTINSFNYNDPVNNRTILYIKPGGCQQFYKSFNIMKNIWIIPERNVIGTIPQDFLPPTSLKNGDSSYYDPNYLQSDQEKDKFLKIVTKIFNRINDNLSGRILLEELSKANPYLGNDNTPDGDFIINDASAVPIQFSNGSQSILLPNVIIMGAEPDLFETNSSNISLRNNYMPSNHGFGSIAIVTFSPEYSFRFKDNSMNEFIQDPALTLMHELIHSLHGLYGAKGITTKYTITQKQNPLITNIRGTNIEEFLTFGGTDLNIITSAQSNDIYTNLLADYKKIASKLSKVQVSNPLLNPYKDVFEAKYGLDKDASGIYSVNINKFNDIFKKLYSFTEFDLATKFQVKCRQTYIGQYKYFKLSNLLNDSIYNISEGYNINNLKVNFRGQNANLNPRIITPITGRGLVKKIIRFCKNIVSVKGIRKSICIEINNGELFFVASENSYNDDNINTPKEIDDTVTSNNNYENDLDQVILNFNSESAPGLSDEKLNLTIQNDAYIPKYDSNGTSDIEQHDVNELNVFFYLDAQKVPEGENNVNLTSSIDTALLEQPKIYTFFSSEFINNVNKPVQAALFVGWIQQVLVDFTTEANQKSTVDKIADISIVVPYIGLALNIGNEAQKGNFKDALELLGAGILLEFEPELLIPTILVFTIKSFLGSSDNKNKVIKAINNALKERDEKWKEVYSFIVSNWMTKINTQFNKRKEQMYQALQNQVNALKAIIESKYNSYTLEEKNELTNKYDIEQIENELNQKVSIAMNNIDRFLTESSISYLMKLINEVKINKLREYDENVKTYLLDYIIKHGSILGESQQELNSMVIDTLNNSIPFKLSSYTDDKILISYFNKFFKRIKSSSVLNMRYKNDKYVDTSGYDSNININGDVYKYPTNKNQFGIYNDKLSEVNISQNDYIIYDNKYKNFSISFWVRIPNYDNKIVNVNNEYTIINCMRDNNSGWKVSLNHNEIIWTLQDNSGINQKLAFNYGNANGISDYINKWIFVTITNDRLGDSKLYINGNLIDKKSILNLGNIHVSDNILFKIVNCSYTRYIGIRYFNIFDKELDETEIQTLYNNEPNANILKDFWGNYLLYDKEYYLLNVLKPNNFINRRTDSTLSINNIRSTILLANRLYSGIKVKIQRVNNSSTNDNLVRKNDQVYINFVASKTHLLPLYADTATTNKEKTIKISSSGNRFNQVVVMNSVGNNCTMNFKNNNGNNIGLLGFKADTVVASTWYYTHMRDNTNSNGFFWNFISEEHGWQEK

SEQ ID NO: 127 - protein, 1251 aa, Clostridium butyricum
MPKINSFNYNDPVNDRTILYIKPGGCQEFYKSFNIMKNIWIIPERNVIGTTPQDFHPPTSLKNGDSSYYDPNYLQSDEEKDRFLKIVTKIFNRINNNLSGGILLEELSKANPYLGNDNTPDNQFHIGDASAVEIKFSNGSQDILLPNVIIMGAEPDLFETNSSNISLRNNYMPSNHGFGSIAIVTFSPEYSFRFNDNSMNEFIQDPALTLMHELIHSLHGLYGAKGITTKYTITQKQNPLITNIRGTNIEEFLTFGGTDLNIITSAQSNDIYTNLLADYKKIASKLSKVQVSNPLLNPYKDVFEAKYGLDKDASGIYSVNINKFNDIFKKLYSFTEFDLATKFQVKCRQTYIGQYKYFKLSNLLNDSIYNISEGYNINNLKVNFRGQNANLNPRIITPITGRGLVKKIIRFCKNIVSVKGIRKSICIEINNGELFFVASENSYNDDNINTPKEIDDTVTSNNNYENDLDQVILNFNSESAPGLSDEKLNLTIQNDAYIPKYDSNGTSDIEQHDVNELNVFFYLDAQKVPEGENNVNLTSSIDTALLEQPKIYTFFSSEFINNVNKPVQAALFVSWIQQVLVDFTTEANQKSTVDKIADISIVVPYIGLALNIGNEAQKGNFKDALELLGAGILLEFVPELLIPTILVFTIKSFLGSSDNKNKVIKAINNALKERDEKWKEVYSFIVSNWMTKINTQFNKRKEQMYQALQNQVNALKTIIEFKYNSYTLEEKKELKNNYDIEQIENELNQKVSIAMNNIDRFLTESSISYLMKLINEVKINKLREYDENVKTYLLDYIIQHGSILGESQQELNSMVIDTLNNSIPFKLSSYTDDKILISYFNKFFKRIKSSSVLNMRYKNDKYVDTSGYDSNININGEIFIYPTNKNQFTIFNSKPSEVNISQNDYIIYDNKYKNFSISFWVRIPNYDNKIVNINNEYTIINCMRDNNSGWKVSLNHNEIIWTLQDNARINQKLVFKYGNANGISDYINKWIFVTITNDRLGDSKLYINGHLIDQKSILNLGNIHVSDNILFKIVNCSYTRYIGIRYFNIFDKELDETEIQTLYSNEPNTNILKDFWGNYLLYDKGYYLLNVLKPNNFIDRRKDSTLSINNIRSTILLANRLYSGIKVKIQRVNDSSTNDRFVRKNDQVYINYISNSSSYSLYADTNTTDKEKTIKSSSSGNRFNQVVVMNSVGNNCTMNFKNNNGNNIGLLGFKADTVVASTWYYTHMRDHTNSNGCFWNFISEEHGWQEK

SEQ ID NO: 128 - protein, 1252 aa, Clostridium botulinum
MPKINSFNYNDPVNDRTILYIKPGGCQEFYKSFNIMKNIWIIPERNVIGTTPQDFHPPTSLKNGDSSYYDPNYLQSDEEKDRFLKIVTKIFNRINNNLSGGILLEELSKANPYLGNDNTPDNQFHIGDASAVEIKFSNGSQDILLPNVIIMGAEPDLFETNSSNISLRNNYMPSNHGFGSIAIVTFSPEYSFRFNDNSMNEFIQDPALTLMHELIHSLHGLYGAKGITTKYTITQKQNPLITNIRGTNIEEFLTFGGTDLNIITSAQSNDIYTNLLADYKKIASKLSKVQVSNPLLNPYKDVFEAKYGLDKDASGIYSVNINKFNDIFKKLYSFTEFDLATKFQVKCRQTYIGQYKYFKLSNLLNDSIYNISEGYNINNLKVNFRGQNANLNPRIITPITGRGLVKKIIRFCKNIVSVKGIRKSICIEINNGELFFVASENSYNDDNINTPKEIDDTVTSNNNYENDLDQVILNFNSESAPGLSDEKLNLTIQNDAYIPKYDSNGTSDIEQHDVNELNVFFYLDAQKVPEGENNVNLTSSIDTALLEQPKIYTFFSSEFINNVNKPVQAALFVSWIQQVLVDFTTEANQKSTVDKIADISIVVPYIGLALNIGNEAQKGNFKDALELLGAGILLEFEPELLIPTILVFTIKSFLGSSDNKNKVIKAINNALKERDEKWKEVYSFIVSNWMTKINTQFNKRKEQMYQALQNQVNAIKTIIESKYNSYTLEEKNELTNKYDIKQIENELNQKVSIAMNNIDRFLTESSISYLMKLINEVKINKLREYDENVKTYLLNYIIQHGSILGESQQELNSMVTDTLNNSIPFKLSSYTDDKILISYFNKFFKRIKSSSVLNMRYKNDKYVDTSGYDSNININGDVYKYPTNKNQFGIYNDKLSEVNISQNDYIIYDNKYKNFSISFWVRIPNYDNKIVNVNNEYTIINCMRDNNSGWKVSLNHNEIIWTLQDNAGINQKLAFNYGNANGISDYINKWIFVTITNDRLGDSKLYINGNLIDQKSILNLGNIHVSDNILFKIVNCSYTRYIGIRYFNIFDKELDETEIQTLYSNEPNTNILKDFWGNYLLYDKEYYLLNVLKPNNFIDRRKDSTLSINNIRSTILLANRLYSGIKVKIQRVNNSSTNDNLVRKNDQVYINFVASKTHLFPLYADTATTNKEKTIKISSSGNRFNQVVVMNSVGNNCTMNFKNNNGNNIGLLGFKADTVVASTWYYTHMRDHTNSNGCFWNFISEEHGWQEK

SEQ ID NO: 129 - protein, 1251 aa, Clostridium botulinum
MPKINSFNYNDPVNDRTILYIKPGGCQEFYKSFNIMKNIWIIPERNVIGTTPQDFHPPTSLKNGDSSYYDPNYLQSDEEKDRFLKIVTKIFNRINNNLSGGILLEELSKANPYLGNDNTPDNQFHIGDASAVEIKFSNGSQDILLPNVIIMGAEPDLFETNSSNISLRNNYMPSNHRFGSIAIVTFSPEYSFRFNDNCMNEFIQDPALTLMHELIHSLHGLYGAKGITTKYTITQKQNPLITNIRGTNIEEFLTFGGTDLNIITSAQSNDIYTNLLADYKKIASKLSKVQVSNPLLNPYKDVFEAKYGLDKDASGIYSVNINKFNDIFKKLYSFTEFDLRTKFQVKCRQTYIGQYKYFKLSNLLNDSIYNISEGYNINNLKVNFRGQNANLNPRIITPITGRGLVKKIIRFCKNIVSVKGIRKSICIEINNGELFFVASENSYNDDNINTPKEIDDTVTSNNNYENDLDQVILNFNSESAPGLSDEKLNLTIQNDAYIPKYDSNGTSDIEQHDVNELNVFFYLDAQKVPEGENNVNLTSSIDTALLEQPKIYTFFSSEFINNVNKPVQAALFVSWIQQVLVDFTTEANQKSTVDKIADISIVVPYIGLALNIGNEAQKGNFKDALELLGAGILLEFEPELLIPTILVFTIKSFLGSSDNKNKVIKAINNALKERDEKWKEVYSFIVSNWMTKINTQFNKRKEQMYQALQNQVNAIKTIIESKYNSYTLEEKNELTNKYDIKQIENELNQKVSIAMNNIDRFLTESSISYLMKIINEVKINKLREYDENVKTYLLNYIIQHGSILGESQQELNSMVTDTLNNSIPFKLSSYTDDKILISYFNKFFKRIKSSSVLNMRYKNDKYVDTSGYDSNININGDVYKYPTNKNQFGIYNDKLSEVNISQNDYIIYDNKYKNFSISFWVRIPNYDNKIVNVNNEYTIINCMRDNNSGWKVSLNHNEIIWTFEDNRGINQKLAFNYGNANGISDYINKWIFVTITNDRLGDSKLYINGNLIDQKSILNLGNIHVSDNILFKIVNCSYTRYIGIRYFNIFDKELDETEIQTLYSNEPNTNILKDFWGNYLLYDKEYYLLNVLKPNNFIDRRKDSTLSINNIRSTILLANRLYSGIKVKIQRVNNSSTNDNLVRKNDQVYINFVASKTHLFPLYADTATTNKEKTIKISSSGNRFNQVVVMNSVGNCTMNFKNNNGNNIGLLGFKADTVVASTWYYTHMRDHTNSNGCFWNFISEEHGWQEK

SEQ ID NO: 130 - protein, 1296 aa, Clostridium botulinum; identical to SEQ ID NO: 1

SEQ ID NO: 131 - protein, 66 aa, Clostridium botulinum
MKINNNFNIDSPVDNKDVAIVRGRKTDIFLKVFQVAPNIWVAPERYYGESLNINEDQKSDGGIYDS

SEQ ID NO: 132 - protein, 66 aa, Clostridium botulinum
MKINNNFNIDSLIDNRDVAIVRGRKTDTFFKVFQVAPNIWIAPERYYGESLNINEDQKSDGGIYDS

SEQ ID NO: 133 - protein, 451 aa, Clostridium botulinum
MPVTINNFNYNDPIDNNNIIMMEPPFARGTGRYYKAFKITDRIWIIPERYTFGYKPEDFNKSSGIFNRDVCEYYDPDYLNTNDKKNIFLQTMIKLFNRIKSKPLGEKLLEMIINGIPYLGDRRVPLEEFNTNIASVTVNKLISNPGEVERKKGIFANLIIFGPGPVLNENETIDIGIQNHFASREGFGGIMQMKFCPEYVSVFNNVQENKGASIFNRRGYFSDPALILMHELIHVLHGLYGIKVDDLPIVPNEKKFFMQSTDAIQAEELYTFGGQDPSIITPSTDKSIYDKVLQNFRGIVDRLNKVLVCISDPSININIYKNKFKDKYKFVEDSEGKYSIDVESFDKLYKSLMFGFTETNIAENYKIKTRASYFSDSLPPVKIKNLLDNEIYTIEEGFNISDKDMEKEYRGQNKAINKQAYEEISKEHLAVYKIQMCKSVKAPGICIDVDN

SEQ ID NO: 134 - protein, 55 aa, Clostridium botulinum
MKINDDLNINSPVDNKNVVIVRARKTNIFFKAFQVAPNIWVAPERYYGEPLNISD

SEQ ID NO: 135 - protein, 1291 aa, Clostridium botulinum phage
MPITINNFNYSDPVDNKNILYLDTHLNTLANEPEKAFRITGNIWVIPDRFSRNSNPNLNKPPRVTSPKSGYYDPNYLSTDSDKDTFLKEIIKLFKRINSREIGEELIYRLSTDIPFPGNNNTPINTFDFDVDFNSVDVKTRQGNNWVKTGSINPSVIITGPRENIIDPETSTFKLTNNTFAAQEGFGALSIISISPRFMLTYSNATNDVGEGRFSKSEFCMDPILILMHELNHAMHNLYGIAIPNDQTISSVTSNIFYSQYNVKLEYAEIYAFGGPTIDLIPKSARKYFEEKALDYYRSIAKRLNSITTANPSSFNKYIGEYKQKLIRKYRFVVESSGEVTVNRNKFVELYNELTQIFTEFNYAKIYNVQNRKIYLSNVYTPVTANILDDNVYDIQNGFNIPKSNLNVLFMGQNLSRNPALRKVNPENMLYLFTKFCHKAIDGRSLYNKTLDCRELLVKNTDLPFIGDISDVKTDIFLRKDINEETEVIYYPDNVSVDQVILSKNTSEHGQLDLLYPSIDSESEILPGENQVFYDNRTQNVDYLNSYYYLESQKLSDNVEDFTFTRSIEEALDNSAKVYTYFPTLANKVNAGVQGGLFLMWANDVVEDFTTNILRKDTLDKISDVSAIIPYIGPALNISNSVRRGNFTEAFAVTGVTILLEAFPEFTIPALGAFVIYSKVQERNEIIKTIDNCLEQRIKRWKDSYEWMMGTWLSRIITQFNNISYQMYDSLNYQAGAIKAKIDLEYKKYSGSDKENIKSQVENLKNSLDVKISEAMNNINKFIRECSVTYLFKNMLPKVIDELNEFDRNTKAKLINLIDSHNIILVGEVDKLKAKVNNSFQNTIPFNIFSYTNNSLLKDIINEYFNNINDSKILSLQNRKNTLVDTSGYNAEVSEEGDVQLNPIFPFDFKLGSSGEDRGKVIVTQNENIVYNSMYESFSISFWIRINKWVSNLPGYTIIDSVKNNSGWSIGIISNFLVFTLKQNEDSEQSINFSYDISNNAPGYNKWFFVTVTNNMMGNMKIYINGKLIDTIKVKELTGINFSKTITFEINKIPDTGLITSDSDNINMWIRDFYIFAKELDGKDINILFNSLQYTNVVKDYWGNDLRYNKEYYMVNIDYLNRYMYANSRQIVFNTRRNNNDFNEGYKIIIKRIRGNTNDTRVRGGDILYFDMTINNKAYNLFMKNETMYADNHSTEDIYAIGLREQTKDINDNIIFQIQPMNNTYYYASQIFKSNFNGENISGICSIGTYRFRLGGDWYRHNYLVPTVKQGNYASLLESTSTHWGFVPVSE

SEQ ID NO: 136 - protein, 1291 aa, Clostridium botulinum; identical to SEQ ID NO: 3

SEQ ID NO: 137 - protein, 425 aa, Clostridium botulinum
PVTINNFNYNDPIDNNNIIMMEPPFARGTGRYYKAFKITDRIWIIPERYTFGYKPEDFNKSSGIFNRDVCEYYDPDYLNTNDKKNIFLQTMIKLFNRIKSKPLGEKLLEMIINGIPYLGDRRVPLEEFNTNIASVTVNKLISNPGEVERKKGIFANLIIFGPGPVLNENETIDIGIQNHFASREGFGGIMQMKFCPEYVSVFNNVQENKGASIFNRRGYFSDPALILMHELIHVLHGLYGIKVDDLPIVPNEKKFFMQSTDAIQAEELYTFGGQDPSIITPSTDKSIYDKVLQNFRGIVDRLNKVLVCISDPNININIYKNKFKDKYKFVEDSEGKYSIDVESFDKLYKSLMFGFTETNIAENYKIKTRASYFSDSLPPVKIKNLLDNEIYTIEEGFNISDKDMEKEYRGQNKAINKQAYEEISK

SEQ ID NO: 138 - protein, 424 aa, Clostridium botulinum
PVTINNFNYNDPIDNNNIIMMEPPFARGTGRYYKAFKITDRIWIIPERYTFGYKPEDFNKSSGIFNRDVCEYYDPDYLNTNDKKNIFLQTMIKLFNRIKSKPLGEKLLEMIINGIPYLGDRRVPLEEFNTNIASVTVNKLISNPGEVERKKGIFANLIIFGPGPVLNENETIDIGIQNHFASREGFGGIMQMKFCPEYVSVFNNVQENKGASIFNRRGYFSDPALILMHELIHVLHGLYGIKVDDLPIVPNEKKFFMQSTDAIQAEELYTFGGQDPSIITPSTDKSIYDKVLQNFRGIVDRLNKVLVCISDPNININIYKNKFKDKYKFVEDSEGKYSIDVESFDKLYKSLMFGFTETNIAENYKIKTRASYFSDSLPPVKIKNLLDNEIYTIEEGFNISDKDMEKEYRGQNKAINKQAYEEIS

SEQ ID NO: 139 - protein, 1280 aa, Clostridium botulinum
MPITINNFNYSDPVDNKNILYLDTHLNTLANEPEKAFRIIGNIWVIPDRFSRDSNPNLNKPPRVTSPKSGYYDPNYLSTDSEKDTFLKEIIKLFKRINSREIGEELIYRLATDIPFPGNNNTPINTFDFDVDFNSVDVKTRQGNNWVKTGSINPSVIITGPRENIIDPETSTFKLTNNTFAAQEGFGALSIISISPRFMLTYSNATNNVGEGRFSKSEFCMDPILILMHELNHAMHNLYGIAIPNDQRISSVTSNIFYSQYKVKLEYAEIYAFGGPTIDLIPKSARKYFEEKALDYYRSIAKRLNSITTANPSSFNKYIGEYKQKLIRKYRFVVESSGEVAVDRNKFAELYKELTQIFTEFNYAKIYNVQNRKIYLSNVYTPVTANILDDNVYDIQNGFNIPKSNLNVLFMGQNLSRNPALRKVNPENMLYLFTKFCHKAIDGRSLYNKTLDCRELLVKNTDLPFIGDISDIKTDIFLSKDINEETEVIDYPDNVSVDQVILSKNTSEHGQLDLLYPIIEGESQVLPGENQVFYDNRTQNVDYLNSYYYLESQKLSDNVEDFTFTTSIEEALDNSGKVYTYFPKLADKVNTGVQGGLFLMWANDVVEDFTTNILRKDTLDKISDVSAIIPYIGPALNISNSVRRGNFTEAFAVTGVTILLEAFQEFTIPALGAFVIYSKVQERNEIIKTIDNCLEQRIKRWKDSYEWMIGTWLSRITTQFNNISYQMYDSLNYQADAIKDKIDLEYKKYSGSDKENIKSQVENLKNSLDIKISEAMNNINKFIRECSVTYLFKNMLPKVIDELNKFDLKTKTELINLIDSHNIILVGEVDRLKAKVNESFENTIPFNIFSYTNNSLLKDIINEYFNSINDSKILSLQNKKNALVDTSGYNAEVRLEGDVQVNTIYTNDFKLSSSGDKIIVNLNNNILYSAIYENSSVSFWIKISKDLTNSHNEYTIINSIKQNSGWKLCIRNGNIEWILQDINRKYKSLIFDYSESLSHTGYTNKWFFVTITNNIMGYMKLYINGELKQSERIEDLNEVKLDKTIVFGIDENIDENQMLWIRDFNIFSKELSNEDINIVYEGQILRNVIKDYWGNPLKFDTEYYIINDNYIDRYIAPKSNILVLVQYPDRSKLYTGNPITIKSVSDKNPYSRILNGDNIMFHMLYNSGKYMIIRDTDTIYAIEGRECSKNCVYALKLQSNLGNYGIGIFSIKNIVSQNKYCSQIFSSFMKNTMLLADIYKPWRFSFENAYTPVAVTNYETKLLSTSSFWKFISRDPGWVE

SEQ ID NO: 140 - protein, 1280 aa, Clostridium botulinum
MPITINNFNYSDPVDNKNILYLDTHLNTLANEPEKAFRIIGNIWVIPDRFSRDSNPNLNKPPRVTSPKSGYYDPNYLSTDSEKDTFLKEIIKLFKRINSREIGEELIYRLATDIPFPGNNNTPINTFDFDVDFNSVDVKTRQGNNWVKTGSINPSVIITGPRENIIDPETSTFKLTNNTFAAQEGFGALSIISISPRFMLTYSNATNNVGEGRFSKSEFCMDPILILMHELNHTMHNLYGIAIPNDQRISSVTSNIFYSQYKVKLEYAEIYAFGGPTIDLIPKSGRKYFEEKALDYYRSIAKRLNSITTANPSSFNKYIGEYKQKLIRKYRFVVESSGEVAVDRNKFAELYKELTQIFTEFNYAKIYNVQNRKIYLSNVYTPVTANILDDNVYDIQNGFNIPKSNLNVLFMGQNLSRNPALRKVNPENMLYLFTKFCHKAIDGRSLYNKTLDCRELLVKNTDLPFIGDISDIKTDIFLSKDINVETEVIDYPDNVSVDQVILSKNTSEHGQLDLLYPIIEGESQVLPGENQVFYDNRTQNVDYLNSYYYLESQKLSDNVEDFTFTTSIEEALDNSGKVYTYFPKLADKVNTGVQGGLFLMWANDVVEDFTTNILRKDTLDKISDVSAIIPYIGPALNISNSVRRENFTEAFAVTGVTILLEAFQEFTIPALGAFVIYSKVQERNEIIKTIDNCLEQRIKRWKDSYEWMIGTWLSRITTQFNNISYQMYDSLNYQADAIKDKIDLEYKKYSGSDKENIKSQVENLKNSLDIKISEAMNNINKFIRECSVTYLFKNMLPKVIDELNKFDLKTKTELINLIDSHNIILVGEVDRLKAKVNESFENTIPFNIFSYTNNSLLKDIINEYFNSINDSKILSLQNKKNALVDTSGYNAEVRLEGDVQVNTIYTNDFKLSSSGDKIIVNLNNNILYSAIYENSSVSFWIKISKDLTNSHNEYTIINSIKQNSGWKLCIRNGNIEWILQDINRKYKSLIFDYSESLSHTGYTNKWFFVTITNNIMGYMKLYINGELKQSERIEDLNEVKLDKTIVFGIDENIDENQMLWIRDFNIFSKELSNEDINIVYEGQILRNVIKDYWGNPLKFDTEYYIINDNYIDRYIAPKSNILVLVQYPDRSKLYTGNPITIKSVSDKNPYSRILNGDNIMFHMLYNSGKYMIIRDTDTIYAIEGRECSKNCVYALKLQSNLGNYGIGIFSIKNIVSQNKYCSQIFSSFMKNTMLLADIYKPWRFSFENAYTPVAVTNYETKLLSTSSFWKFISRDPGWVE

SEQ ID NO: 141 - protein, 552 aa, Clostridium botulinum phage CN
MPITINNFNYSDPVDNKNILYLDTHLNTLANEPEKAFRITGNIWVIPDRFSRNSNPNLNKPPRVTSPKSGYYDPNYLSTDSDKDTFLKEIIKLFKRINSREIGEELIYRLSTDIPFPGNNNTPINTFDFDVDFNSVDVKTRQGNNWVKTGSINPSVIITGPRENIIDPETSTFKLTNNTFAAQEGFGALSIISISPRFMLTYSNATNDVGEGRFSKSEFCMDPILILMHELNHAMHNLYGIAIPNDQTISSVTSNIFYSQYNVKLEYAEIYAFGGPTIDLIPKSARKYFEEKALDYYRSIAKRLNSITTANPSSFNKYIGEYKQKLIRKYRFVVESSGEVTVNRNKFVELYNELTQIFTEFNYAKIYNVQNRKIYLSNVYTPVTANILDDNVYDIQNGFNIPKSNLNVLFMGQNLSRNPALRKVNPENMLYLFTKFCHKAIDGRSLYNKTLDCRELLVKNTDLPFIGDISDVKTDIFLRKDINEETEVIYYPDNVSVDQVILSKNTSEHGQLDLLYPSIDSESEILPGENQVFYDNRTQNVDYLNSYYYLES

SEQ ID NO: 142 - protein, 1291 aa, Clostridium botulinum
MPVTINNFNYNDPIDNNNIIMMEPPFARGTGRYYKAFKITDRIWIIPERYTFGYKPEDFNKSSGIFNRDVCEYYDPDYLNTNDKKNIFLQTMIKLFNRIKSKPLGEKLLEMIINGIPYLGDRRVPLEEFNTNIASVTVNKLISNPGEVERKKGIFANLIIFGPGPVLNENETIDIGIQNHFASREGFGGIMQMKFCPEYVSVFNNVQENKGASIFNRRGYFSDPALILMHELIHVLHGLYGIKVDDLPIVPNEKKFFMQSTDAIQAEELYTFGGQDPSIITPSTDKSIYDKVLQNFRGIVDRLNKVLVCISDPNININIYKNKFKDKYKFVEDSEGKYSIDVESFDKLYKSLMFGFTETNIAENYKIKTRASYFSDSLPPVKIKNLLDNEIYTIEEGFNISDKNMEKEYRGQNKAINKQAYEEISKEHLAVYKIQMCKSVRAPGICIDVDNEDLFFIADKNSFSDDLSKNERIEYDTQSNYIENRSSIDELILDTNLISKIELPSENTESLTDFNVDVPVYEKQPAIKKIFTDENTIFQYLYSQTFPLDIRDISLTSSFDDALLFSNKVYSFFSMDYIKTANKVVEAGLFAGWVKQIVDDFVIEANKSSTMDKIADISLIVPYIGLALNVGNETAKGNFENAFEIAGASILLEFIPELLIPVVGAFLLESYIDNKNKIIKTIDNALTKRDEKWIDMYGLIVAQWLSTVNTQFYTIKEGMYKALNYQAQALEEIIKYKYNIYSEKEKSNINIDFNDINSKLNEGINQAVDNINNFINECSVSYLMKKMIPLAVEKLLDFDNTLKKNLLNYIDENKLYLIGSAEYEKSKVDKHLKTIIPFDLSMYTNNTILIEIFNKYNSEILNNIILNLRYRDNNLIDLSGYGANVEVYDGVELNDKNQFKLTSSTNSEIRVTQNQNIIFNSMFLDFSVSFWIRIPKYKNDGIQNYIHNEYTIINCIKNNSGWKISIRGNRIIWTLTDINGKTKSVFFEYSIREDISDYINRWFFVTITNNSDNAKIYINGKLESNIDIKDIGEVIANGEIIFKLDGDIDRTQFIWMKYFSIFNTELSQSNIKEIYKIQSYSEYLKDFWGNPLMYNKEYYMFNAGNKNSYIKLKKDSSVGEILTRSKYNQNSNYINYRNLYIGEKFIIRRKSNSQSINDDIVRKEDYIYLDFFNSNREWRVYAYKDFKEEEKKLFLANIYDSNEFYKTIQIKEYDEQPTYSCQLLFKKDEESTDEIGLIGIHRFYESGIVLKDYKNYFCISKWYLKEVKRKPYNPNLGCNWQFIPKDEGWIE

SEQ ID NO: 143 - protein, 438 aa, Clostridium butyricum
MPTINSFNYNDPVNNRTILYIKPGGCQQFYKSFNIMKNIWIIPERNVIGTIPQDFLPPTSLKNGDSSYYDPNYLQSDQEKDKFLKIVTKIFNRINDNLSGRILLEELSKANPYLGNDNTPDGDFIINDASAVPIQFSNGSQSILLPNVIIMGAEPDLFETNSSNISLRNNYMPSNHGFGSIAIVTFSPEYSFRFKDNSMNEFIQDPALTLMHELIHSLHGLYGAKGITTMYTITQKQNPLITNIRGTNIEEFLTFGGTDLNIITSAQSNDIYTNLLADYKKIASKLSKVQVSNPLLNPYKDVFEAKYGLDKDASGIYSVNINKFNDIFKKLYSFTEFVLATKFQVKCRQTYIGQYKYFKLSNLLNDSIYNISEGYNINNLKVNFRGQNANLNPRIITPITGRGLVKKIIRFCKNIVSVKGIRKSICIEINNGELFFVA

SEQ ID NO: 144 - protein, 457 aa, Clostridium botulinum
MPITINNFRYSDPVNNDTIIMMEPPYCKGLDIYYKAFKITDRIWIVPERYEFGTKPEDFNPPSSLIEGASEYYDPNYLRTDSDKDRFLQTMVKLFNRIKNNVAGEALLDKIINAIPYLGNSYSLLDKFDTNSNSVSFNLLEQDPSGATTKSAMLTNLIIFGPGPVLNKNEVRGIVLRVDNKNYFPCRDGFGSIMQMAFCPEYVPTFDNVIENITSLTIGKSKYFQDPALLLMHELIHVLHGLYGMQVSSHEIIPSKQEIYMQHTYPISAEELFTFGGQDANLISIDIKNDLYEKTLNDYKAIANKLSQVTSCNDPNIDIDSYKQIYQQKYQFDKDSNGQYIVNEDKFQILYNSIMYGFTEIELGKKFNIKTRLSYFSMNHDPVKIPNLLDDTIYNDTEGFNIESKDLKSEYKGQNMRVNTNAFRNVDGSGLVSKLIGLCKKIIPPTNIRENLYNRTA

SEQ ID NO: 145 - protein, 1315 aa, Clostridium tetani
MPITINNFRYSDPVNNDTIIMMEPPYCKGLDIYYKAFKITDRIWIVPERYEFGTKPEDFNPPSSLIEGASEYYDPNYLRTDSDKDRFLQTMVKLFNRIKNNVAGEALLDKIINAIPYLGNSYSLLDKFDTNSNSVSFNLLEQDPSGATTKSAMLTNLIIFGPGPVLNKNEVRGIVLRVDNKNYFPCRDGFGSIMQMAFCPEYVPTFDNVIENITSLTIGKSKYFQDPALLLMHELIHVLHGLYGMQVSSHEIIPSKQEIYMQHTYPISAEELFTFGGQDANLISIDIKNDLYEKTLNDYKAIANKLSQVTSCNDPNIDIDSYKQIYQQKYQFDKDSNGQYIVNEDKFQILYNSIMYGFTEIELGKKFNIKTRLSYFSMNHDPVKIPNLLDDTIYNDTEGFNIESKDLKSEYKGQNMRVNTNAFRNVDGSGLVSKLIGLCKKIIPPTNIRENLYNRTASLTDLGGELCIKIKNEDLTFIAEKNSFSEEPFQDEIVSYNTKNKPLNFNYSLDKIIVDYNLQSKITLPNDRTTPVTKGIPYAPEYKSNAASTIEIHNIDDNTIYQYLYAQKSPTTLQRITMTNSVDDALINSTKIYSYFPSVISKVNQGAQGILFLQWVRDIIDDFTNESSQKTTIDKISDVSTIVPYIGPALNIVKQGYEGNFIGALETTGVVLLLEYIPEITLPVIAALSIAESSTQKEKIIKTIDNFLEKRYEKWIEVYKLVKAKWLGTVNTQFQKRSYQMYRSLEYQVDAIKKIIDYEYKIYSGPDKEQIADEINNLKNKLEEKANKAMININIFMRESSRSFLVNQMINEAKKQLLEFDTQSKNILMQYIKANSKFIGITELKKLESKINKVFSTPIPFSYSKNLDCWVDNEEDIDVILKKSTILNLDINNDIISDISGFNSSVITYPDAQLVPGINGKAIHLVNNESSEVIVHKAMDIEYNDMFNNFTVSFWLRVPKVSASHLEQYGTNEYSIISSMKKHSLSIGSGWSVSLKGNNLIWTLKDSAGEVRQITFRDLPDKFNAYLANKWVFITITNDRLSSANLYINGVLMGSAEITGLGAIREDNNITLKLDRCNNNNQYVSIDKFRIFCKALNPKEIEKLYTSYLSITFLRDFWGNPLRYDTEYYLIPVASSSKDVQLKNITDYMYLTNAPSYTNGKLNIYYRRLYNGLKFIIKRYTPNNEIDSFVKSGDFIKLYVSYNNNEHIVGYPKDGNAFNNLDRILRVGYNAPGIPLYKKMEAVKLRDLKTYSVQLKLYDDKNASLGLVGTHNGQIGNDPNRDILIASNWYFNHLKDKILGCDWYFVPTDEGWTND

SEQ ID NO: 146 - protein, 2017 aa, Clostridium botulinum
MPITINNFRYSDPVNNDTIIMMEPPYCKGLDIYYKAFKITDRIWIVPERYEFGTKPEDFNPPSSLIEGASEYYDPNYLRTDSDKDRFLQTMVKLFNRIKNNVAGEALLDKIINAIPYLGNSYSLLDKFDTNSNSVSFNLLEQDPSGATTKSAMLTNLIIFGPGPVLNKNEVRGIVLRVDNKNYFPCRDGFGSIMQMAFCPEYVPTFDNVIENITSLTIGKSKYFQDPALLLMHELIHVLHGLYGMQVSSHEIIPSKQEIYMQHTYPISAEELFTFGGQDANLISIDIKNDLYEKTLNDYKAIANKLSQVTSCNDPNIDIDSYKQIYQQKYQFDKDSNGQYIVNEDKFQILYNSIMYGFTEIELGKKFNIKTRLSYFSMNHDPVKIPNLLDDTIYNDTEGFNIESKDLKSEYKGQNMRVNTNAFRNVDGSGLVSKLIGLCKKIIPPTNIRENLYNRTASLTDLGGELCIKIKNEDLTFIAEKNSFSEEPFQDEIVSYNTKNKPLNFNYSLDKIIVDYNLQSKITLPNDRTTPVTKGIPYAPEYKSNAASTIEIHNIDDNTIYQYLYAQKSPTTLQRITMTNSVDDALINSTKIYSYFPSVISKVNQGAQGILFLQWVRDIIDDFTNESSQKTTIDKISDVSTIVPYIGPALNIVKQGYEGNFIGALETTGVVLLLEYIPEITLPVIAALSIAESSTQKEKIIKTIDNFLEKRYEKWIEVYKMPVNIKNFNYNDPINNDDIIMMEPFNDPGPGTYYKAFRIIDRIWIVPERFTYGFQPDQFNASTGVFSKDVYEYYDPTYLKTDAEKDKFLKTMIKLFNRINSKPSGQRLLDMIVDAIPYLGNASTPPDKFAANVANVSINKKIIQPGAEDQIKGLMTNLIIFGPGPVLSDNFTDSMIMNGHSPISEGFGARMMIRFCPSCLNVFNNVQENKDTSIFSRRAYFADPALTLMHELIHVLHGLYGIKISNLPITPNTKEFFMQHSDPVQAEELYTFGGHDPSVISPSTDMNIYNKALQNFQDIANRLNIVSSAQGSGIDISLYKQIYKNKYDFVEDPNGKYSVDKDKFDKLYKALMFGFTETNLAGEYGIKTRYSYFSEYLPPIKTEKLLDNTIYTQNEGFNIASKNLKTEFNGQNKAVNKEAYEEISLEHLVIYRIAMCKPVMYKNTGKSEQCIIVNNEDLFFIANKDSFSKDLAKAETIAYNTQNNTIENNFSIDQLILDNDLSSGIDLPNENTEPFTNFDDIDIPVYIKQSALKKIFVDGDSLFEYLHAQTFPSNIENLQLTNSLNDALRNNNKVYTFFSTNLVEKANTVVGASLFVNWVKGVIDDFTSESTQKSTIDKVSDVSIIIPYIGPALNVGNETAKENFKNAFEIGGAAILMEFIPELIVPIVGFFTLESYVGNKGHIIMTISNALKKRDQKWTDMYGLIVSQWLSTVNTQFYTIKERMYNALNNQSQAIEKIIEDQYNRYSEEDKMNINIDFNDIDFKLNQSINLAINNIDDFINQCSISYLMNRMIPLAVKKLKDFDDNLKRDLLEYIDTNELYLLDEVNILKSKVNRHLKDSIPFDLSLYTKDTILIQVFNNYISNISSNAILSLSYRGGRLIDSSGYGATMNVGSDVIFNDIGNGQFKLNNSENSNITAHQSKFVVYDSMFDNFSINFWVRTPKYNNNDIQTYLQNEYTIISCIKNDSGWKVSIKGNRIIWTLIDVNAKSKSIFFEYSIKDNISDYINKWFSITITNDRLGNANIYINGSLKKSEKILNLDRINSSNDIDFKLINCTDTTKFVWIKDFNIFGRELNATEVSSLYWIQSSTNTLKDFWGNPLRYDTQYYLFNQGMQNIYIKYFSKASMGETAPRTNFNNAAINYQNLYLGLRFIIKKASNSRNINNDNIVREGDYIYLNIDNISDESYRVYVLVNSKEIQTQLFLAPINDDPTFYDVLQIKKYYEKTTYNCQILCEKDTKTFGLFGIGKFVKDYGYVWDTYDNYFCISQWYLRRISENINKLRLGCNWQFIPVDEGWTE

SEQ ID NO: 147 - protein, 438 aa, Clostridium botulinum
MPKINSFNYNDPVNDRTILYIKPGGCQEFYKSFNIMKNIWIIPERNVIGTTPQDFHPPTSLKNGDSSYYDPNYLQSDEEKDRFLKIVTKIFNRINNNLSGGILLEELSKANPYLGNDNTPDNQFHIGDASAVEIKFSNGSQDILLPNVIIMGAEPDLFETNSSNISLRNNYMPSNHGFGSIAIVTFSPEYSFRFNDNSMNEFIQDPALTLMHELIHSLHGLYGAKGITTMYTITQKQNPLITNIRGTNIEEFLTFGGTDLNIITSAQSNDIYTNLLADYKKIASKLSKVQVSNPLLNPYKDVFEAKYGLDKDASGIYSVNINKFNDIFKKLYSFTEFVLATKFQVKCRQTYIGQYKYFKLSNLLNDSIYNISEGYNINNLKVNFRGQNANLNPRIITPITGRGLVKKIIRFCKNIVSVKGIRKSICIEINNGELFFVA

SEQ ID NO: 148 - protein, 252 aa, Clostridium botulinum
MPTINSFNYNDPVNNRTILYIKPGGCQQFYKSFNIMKNIWIIPERNVIGTIPQDFLPPTSLKNGDSSYYDPNYLQSDQEKDKFLKIVTKIFNRINDNLSGRILLEELSKANPYLGNDNTPDGDFIINDASAVPIQFSNGSQSILLPNVIIMGAEPDLFETNSSNISLRNNYMPSNHGFGSIAIVTFSPEYSFRFKDNSMNEFIQDPALTLMHELIHSLHGLYGAKGITTMYTITQKQNPLITNIRGTNIEEF

SEQ ID NO: 149 - protein, 1310 aa, clostridium tetani
RIPITINNFRYSVPVNNDTIIMMEPPYCKGLDIYYKAFKITDRIWIVPERYEFGTKPEDFNPPSSLIEGASEYYDPNYLRTDSDKDRFLQTMVKLFNRIKNNVAGEALLDKIINAIPYLGNSYSLLDKFDTNSNSVSFNLSEQDPSGATTKSAMLTSLIIFGPGPVLNKNEVRGIVLRVDNKNYFPCRDGFGSIMQMTFCPEYIPTFDNVIENITSLTIGKSKYFQDPALLLMHELIHVLHGLYGMQVSSHEIIPSKQEIYMQHTYPISAEELFTFGGQDANLISIDIKNDLYEKTLNDYKAIANKLSQVTSCNDPNIDIDSYKQIYQQKYQFDKDSNGQYIVNEDKFQILYNSIMYGFTEIELGKKFNIKTRLSYFSMNHDPVKIPNLLDDTIYNDTEGFNIESKDLKSEYKGQNMRVNTNAFRNVDGSGLVSKLIGLCKKIIPPTNIRENLYNRTAALTDLGGELCIKIKNEDLIFIAEKNSFSEEPFQDEIVSYNTKNKPLNFNYSLDKIILDYNLQSKITLPNDRTTPVTKGIPYAPEYKSNAASTIEIHNIDDNTIYQYLYAQKSPTTLQRITMTNSVDDALINSTKIYSYFPSVISKVNQGAQGILFLQWVRDIIDDFTNESSQKTTIDKISDVSTIVPYIGPALNIVKQGYEGNFIGALETTGVVLLLEYIPEITLPVIAALSIAESSTQKEKIIKTIDNFLEKRYEKWIEVYKLVKAKWLGTVNTQFQKRSYQMYRSLEYQVDAIKKIIDYEYKIYSGPDKEQIADEINNLKNKLEEKANKAMININIFMRESSRSFLVNQMINETKKQLLEFDTQSKNILMQYIKANSKFIGITELKKLESKINKVFSTPIPFSYSKNLDCWVDNEEDIDVILKKSTILNLDINNDIISDISGFNSSVITYPDAQLVPGINGKAIHLVNNESSEVIVHKAMDIEYNDMFNNFTVSFWLRVPKVSASHLEQYDTNEYSIISSMKKYSLSIGSGWSVSLKGNNLIWTLKDSAGEVRQITFRDLSDKFNAYLANKWVFITITNDRLSSANLYINGVLMGSAEITGLGAIREDNNITLKLDRCNNNNQYVSIDKFRIFCKALNPKEIEKLYTSYLSITFLRDFWGNPLRYDTEYYLIPVAYSSKDVQLKNITDYMYLTNAPSYTNGKLNIYYRRLYSGLKFIIKRYTPNNEIDSFVRSGDFIKLYVSYNNNEHIVGYPKDGNAFNNLDRILRVGYNAPGIPLYKKMEAVKLRDLKTYSVQLKLYDDKDASLGLVGTHNGQIGNDPNRDILIASNWYFNHLKDKTLTCDWYFVPTD

SEQ ID NO: 150 - protein, 1297 aa, Clostridium botulinum; identical to SEQ ID NO: 7
  misc_feature (7)..(7): Xaa can be any naturally occurring amino acid

SEQ ID NO: 151 - protein, 448 aa, Clostridium botulinum
MPFVNKQFNYKDPVNGVDIAYIKIPNAGQMQVKAFKIHNKIWVIPERDTFTNPEEGDLNPPPEAKQVPVSYYDSTYLSTDNEKDNYLKGVTKLFERIYSTDLGRMLLTSIVRGIPFWGGSTIDTELKVIDTNCINVIQPDGSYRSEELNLVIIGPSADIIQFECKSFGHEVLNLTRNGYGSTQYIRFSPDFTFGFEESLEVDTNPLLGAGKFATDPAVTLAHELIHAGHRLYGIAINPNRVFKVNTNAYYEMSGLEVSFEELRTFGGHDAKFIDSLQENEFRLYYYNKFKDIASTLNKAKSIVGTTASLQYMKNVFKEKYLLSEDTSGKFSVDKLKFDKLYKMKTEIYTEDDNFVKFFKVLNRKTYLNFDKAVFKINIVPKVNYTIYDGFNLRNTNLAANFNGQNTEINNMNFTKLKNFTGLFEFYKLLCVRGIITSKTKSLDEGYNK

SEQ ID NO: 152 - protein, 1278 aa, Clostridium botulinum
MPVVINSFNYNDPVNDDTILYMQIPYEEKSKKYYKAFEIMRNVWIIPERNTIGTDPSDFDPPASLENGSSAYYDPNYLTTDAEKDRYLKTTIKLFKRINSNPAGEVLLQEISYAKPYLGNEHTPINEFHPVTRTTSVNIKSSTNVKSSIILNLLVLGAGPDIFENSSYPVRKLMDSGGVYDPSNDGFGSINIVTFSPEYEYTFNDISGGYNSSTESFIADPAISLAHELIHALHGLYGARGVTYKETIKVKQAPLMIAEKPIRLEEFLTFGGQDLNIITSAMKEKIYNNLLANYEKIATRLSRVNSAPPEYDINEYKDYFQWKYGLDKNADGSYTVNENKFNEIYKKLYSFTEIDLANKFKVKCRNTYFIKYGFLKVPNLLDDDIYTVSEGFNIGNLAVNNRGQNIKLNPKIIDSIPDKGLVEKIVKFCKSVIPRKGTKAPPRLCIRVNNRELFFVASESSYNENDINTPKEIDDTTNLNNNYRNNLDEVILDYNSETIPQISNQTLNTLVQDDSYVPRYDSNGTSEIEEHNVVDLNVFFYLHAQKVPEGETNISLTSSIDTALSEESQVYTFFSSEFINTINKPVHAALFISWINQVIRDFTTEATQKSTFDKIADISLVVPYVGLALNIGNEVQKENFKEAFELLGAGILLEFVPELLIPTILVFTIKSFIGSSENKNKIIKAINNSLMERETKWKEIYSWIVSNWLTRINTQFNKRKEQMYQALQNQVDAIKTVIEYKYNNYTSDERNRLESEYNINNIREELNKKVSLAMENIERFITESSIFYLMKLINEAKVSKLREYDEGVKEYLLDYISEHRSILGNSVQELNDLVTSTLNNSIPFELSSYTNDKILILYFNKLYKKIKDNSILDMRYENNKFIDISGYGSNISINGDVYIYSTNRNQFGIYSSKPSEVNIAQNNDIIYNGRYQNFSISFWVRIPKYFNKVNLNNEYTIIDCIRNNNSGWKISLNYNKIIWTLQDTAGNNQKLVFNYTQMISISDYINKWIFVTITNNRLGNSRIYINGNLIDEKSISNLGDIHVSDNILFKIVGCNDTRYVGIRYFKVFDTELGKTEIETLYSDEPDPSILKDFWGNYLLYNKRYYLLNLLRTDKSITQNSNFLNINQQRGVYQKPNIFSNTRLYTGVEVIIRKNGSTDISNTDNFVRKNDLAYINVVDRDVEYRLYADISIAKPEKIIKLIRTSNSNNSLGQIIVMDSIGNNCTMNFQNNNGGNIGLLGFHSNNLVASSWYYNNIRKNTSSNGCFWSFISKEHGWQEN

SEQ ID NO: 153 - protein, 260 aa, Clostridium botulinum
MQFVNKQFNYKDPVNGVDIAYIKIPNVGQMQPVKAFKIHNKIWVIPERDTFTNPEEGDLNPPPEAKQVPVSYYDSTYLSTDNEKDNYLKGVTKLFERIYSTDLGRMLLTSIVRGIPFWGGSTIDTELKVIDTNCINVIQPDGSYRSEELNLVIIGPSADIIQFECKSFGHEVLNLTRNGYGSTQYIRFSPDFTFGFEESLEVDTNPLLGAGKFATDPAVTLAHELIHAGHRLYGIAINPNRVFKVNTNAYYEMSGLEVSF

SEQ ID NO: 154 - protein, 871 aa, Clostridium botulinum
MQFVNKQFNYKDPVNGVDIAYIKIPNAGQMQPVKAFKIHNKIWVIPERDTFTNPEEGDLNPPPEAKQVPVSYYDSTYLSTDNEKDNYLKGVTKLFERIYSTDLGRMLLTSIVRGIPFWGGSTIDTELKVIDTNCINVIQPDGSYRSEELNLVIIGPSADIIQFECKSFGHEVLNLTRNGYGSTQYIRFSPDFTFGFEESLEVDTNPLLGAGKFATDPAVTLAHELIHAGHRLYGIAINPNRVFKVNTNAYYEMSGLEVSFEELRTFGGHDAKFIDSLQENEFRLYYYNKFKDIASTLNKAKSIVGTTASLQYMKNVFKEKYLLSEDTSGKFSVDKLKFDKLYKMLTEIYTEDNFVKFFKVLNRKTYLNFDKAVFKINIVPKVNYTIYDGFNLRNTNLAANFNGQNTEINNMNFTKLKNFTGLFEFYKLLCVRGIITSKTKSLDKGYNKALNDLCIKVNNWDLFFSPSEDNFTNDLNKGEEITSDTNIEAAEENISLDLIQQYYLTFNFDNEPENISIENLSSDIIGQLELMPNIERFPNGKKYELDKYTMFHYLRAQEFEHGKSRIALTNSVNEALLNPSRVYTFFSSDYVKKVNKATEAAMFLGWVEQLVYDFTDETSEVSTTDKIADITIIIPYIGPALNIGNMLYKDDFVGALIFSGAVILLEFIPEIAIPVLGTFALVSYIANKVLTVQTIDNALSKRNEKWDEVYKYIVTNWLAKVNTQIDLIRKKMKEALENQAEATKAIINYQYNQYTEEEKNNINFNIDDLSSKLNESINKAMININKFLNQCSVSYLMNSMIPYGVKRLEDFDASLKDALLKYIYDNRGTLIGQVDRLKDKVNNTLSTDIPFQLSKYVDNQRLLSTFTEYIK

SEQ ID NO: 155 - protein, 252 aa, Clostridium botulinum
MPKINSFNYNDPVNDRTILYIKPGGCQEFYKSFNIMKNIWIIPERNVIGTTPQDFHPPTSLKNGDSSYYDPNYLQSDEEKDRFLKIVTKIFNRINNNLSGGILLEELSKANPYLGNDNTPDNQFHIGDASAVEIKFSNGSQDILLPNVIIMGAEPDLFETNSSNISLRNNYMPSNHGFGSIAIVTFSPEYSFRFNDNSMNEFIQDPALTLMHELIHSLHGLYGAKGITTMYTITQKQNPLITNIRGTNIEEF

SEQ ID NO: 156 - protein, 1268 aa, Clostridium barati
MPVNINNFNYNDPINNTTILYMKMPYYEDSNKYYKAFEIMDNVWIIPERNIIGKKPSDFYPPISLDSGSSAYYDPNYLTTDAEKDRFLKTVIKLFNRINSNPAGQVLLEEIKNGKPYLGNDHTAVNEFCANNRSTSVEIKESNGTTDSMLLNLVILGPGPNILECSTFPVRIFPNNIAYDPSEKGFGSIQLMSFSTEYEYAFNDNTDLFIADPAISLAHELIHVLHGLYGAKGVTNKKVIEVDQGALMAAEKDIKIEEFITFGGQDLNIITNSTNQKIYVILLSNYTAIASRLSQVNRNNSALNTTYYKNFFQWKYGLDQDSNGNYTVNISKFNAIYKKLFSFTECDLAQKFQVKNRSNYLFHFKPFRLLDLLDDNIYSISEGFNIGSLRVNNNGQNINLNSRIVGPIPDNGLVERFVGLCKSIVSKKGTKNSLCIKVNNRDLFFVASESSYNENGINSPKEIDDTTITNNNYKKNLDEVILDYNSDAIPNLSSRLLNTTAQNDSYVPKYDSNGTSEIKEYTVDKLNVFFYLYAQKAPEGESAISLTSSVNTALLDASKVYTFFSSDFINTVNKPVQAALFISWIQQVINDFTTEATQKSTIDKIADISLIVPYVGLALNIGNEVQKGNFKEAIELLGAGILLEFVPELLIPTILVFTIKSFINSDDSKNKIIKAINNALRERELKWKEVYSWIVSNWLTRINTQFNKRKEQMYQALQNQVDGIKKIIEYKYNNYTLDEKNRLRAEYNIYSIKEELNKKVSLAMQNIDRFLTESSISYLMKLINEAKINKLSEYDKRVNQYLLNYILENSSTLGTSSVPELNNLVSNTLNNSIPFELSEYTNDKILIHILIRFYKRIIDSSILNMKYENNRFIDSSGYGSNISINGDIYIYSTNRNQFGIYSSRLSEVNITQNNTIIYNSRYQNFSVSFWVRIPKYNNLKNLNNEYTIINCMRNNNSGWKISLNYNNIIWTLQDTTGNNQKLVFNYTQMIDISDYINKWTFVTITNNRLGHSKLYINGNLTDQKSILNLGNIHVDDNILFKIVGCNDTRYVGIRYFKIFNMELDKTEIETLYHSEPDSTILKDFWGNYLLYNKKYYLLNLLKPNMSVTKNSDILNINRQRGIYSKTNIFSNARLYTGVEVIIRKVGSTDTSNTDNFVRKNDTVYINVVDGNSEYQLYADVSTSAVEKTIKLRRISNSNYNSNQMIIMDSIGDNCTMNFKTNNGNDIGLLGFHLNNLVASSWYYKNIRNNTRNNGCFWSFISKEHGWQE

SEQ ID NO: 157 - protein, 1295 aa, Clostridium botulinum [sequence omitted]

SEQ ID NO: 158 - protein, 1296 aa, Clostridium botulinum
MQFVNKQFNYKDPVNGVDIAYIKIPNVGQMQPVKAFKIHNKIWVIPERDTFTNPEEGDLNPPPEAKQVPVSYYDSTYLSTDNEKDNYLKGVTKLFERIYSTDLGRMLLTSIVRGIPFWGGSTIDTELKVIDTNCINVIQPDGSYRSEELNLVIIGPSADIIQFECKSFGHEVLNLTRNGYGSTQYIRFSPDFTFGFEESLEVDTNPLLGAGKFATDPAVTLAHELIHAGHRLYGIAINPNRVFKVNTNAYYEMSGLEVSFEELRTFGGHDAKFIDSLQENEFRLYYYNKFKDIASTLNKAKSIVGTTASLQYMKNVFKEKYLLSEDTSGKFSVDKLKFDKLYKMLTEIYTEDNFVKFFKVLNRKTYLNFDKAVFKINIVPKVNYTIYDGFNLRNTNLAANFNGQNTEINNMNFTKLKNFTGLFEFYKLLCVRGIITSKTKSLDKGYNKALNDLCIKVNNWDLFFSPSEDNFTNDLNKGEEITSDTNIEAAEENISLDLIQQYYLTFNFDNEPENISIENLSSDIIGQLELMPNIERFPNGKKYELDKYTMFHYLRAQEFEHGKSRIALTNSVNEALLNPSRVYTFFSSDYVKKVNKATEAAMFLGWVEQLVYDFTDETSEVSTTDKIADITIIIPYIGPALNIGNMLYKDDFVGALIFSGAVILLEFIPEIAIPVLGTFALVSYIANKVLTVQTIDNALSKRNEKWDEVYKYIVTNWLAKVNTQIDLIRKKMKEALENQAEATKAIINYQYNQYTEEEKNNINFNIDDLSSKLNESINKAMININKFLNQCSVSYLMNSMIPYGVKRLEDFDASLKDALLKYIYDNRGTLIGQVDRLKDKVNNTLSTDIPFQLSKYVDNQRLLSTFTEYIKNIINTSILNLRYESNHLIDLSRYASKINIGSKVNFDPIDKNQIQLFNLESSKIEVILKNAIVYNSMYENFSTSFWIRIPKYFNSISLNNEYTIINCMENNSGWKVSLNYGEIIWTLQDTQEIKQRVVFKYSQMINISDYINRWIFVTITNNRLNNSKIYINGRLIDQKPISNLGNIHASNNIMFKLDGCRDTHRYIWIKYFNLFDKELNEKEIKDLYDNQSNSGILKDFWGDYLQYDKPYYMLNLYDPNKYVDVNNVGIRGYMYLKGPRGSVMTTNIYLNSSLYRGTKFIIKKYASGNKDNIVRNNDRVYINVVVKNKEYRLATNASQAGVEKILSALEIPDVGNLSQVVVMKSKNDQGITNKCKMNLQDNNGNDIGFIGFHQFNNIAKLVASNWYNRQIERSSRTLGCSWEFIPVDDGWGERPL

SEQ ID NO: 159 - protein, 1296 aa, Clostridium botulinum [sequence omitted]

SEQ ID NO: 160 - protein, 1296 aa, Clostridium botulinum
MPFVNKQFNYKDPVNGVDIAYIKIPNAGQMQPVKAFKIHNKIWVIPERDTFTNPEEGDLNPPPEAKQVPVSYYDSTYLSTDNEKDNYLKGVTKLFERIYSTDLGRMLLTSIVRGIPFWGGSTIDTELKVIDTNCINVIQPDGSYRSEELNLVIIGPSADIIQFECKSFGHEVLNLTRNGYGSTQYIRFSPDFTFGFEESLEVDTNPLLGAGKFATDPAVTLAHELIHAGHRLYGIAINPNRVFKVNTNAYYEMSGLEVSFEELRTFGGHDAKFIDSLQENEFRLYYYNKFKDIASTLNKAKSIVGTTASLQYMKNVFKEKYLLSEDTSGKFSVDKLKFDKLYKMLTEIYTEDNFVKFFKVLNRKTYLNFDKAVFKINIVPKVNYTIYDGFNLRNTNLAANFNGQNTEINNMNFTKLKNFTGLFEFYKLLCVRGIITSKTKSLDKGYNKALNDLCIKVNNWDLFFSPSEDNFTNDLNKGEEITSDTNIEAAEENISLDLIQQYYLTFNFDNEPENISIENLSSDIIGQLELMPNIERFPNGKKYELDKYTMFHYLRAQEFEHGKSRIALTNSVNEALLNPSRVYTFFSSDYVKKVNKATEAAMFLGWVEQLVYDFTDETSEVSTTDKIADITIIIPYIGPALNIGNMLYKDDFVGALIFSGAVILLEFIPEIAIPVLGTFALVSYIANKVLTVQTIDNALSKRNEKWDEVYKYIVTNWLAKVNTQIDLIRKKMKEALENQAEATKAIINYQYNQYTEEEKNNINFNIDDLSSKLNESINKAMININKFLNQCSVSYLMNSMIPYGVKRLEDFDASLKDALLKYIYDNRGTLIGQVDRLKDKVNNTLSTDIPFQLSKYVDNQRLLSTFTEYIKNIINTSILNLRYESNHLIDLSRYASKINIGSKVNFDPIDKNQIQLFNLESSKIEVILKNAIVYNSMYENFSTSFWIRIPKYFNSISLNNEYTIINCMENNSGWKVSLNYGEIIWTLQDTQEIKQRVVFKYSQMINISDYINRWIFVTITNNRLNNSKIYINGRLIDQKPISNLGNIHASNNIMFKLDGCRDTHRYIWIKYFNLFDKELNEKEIKDLYDNQSNSGILKDFWGDYLQYDKPYYMLNLYDPNKYVDVNNVGIRGYMYLKGPRGSVMTTNIYLNSSLYRGTKFIIKKYASGNKDNIVRNNDRVYINVVVKNKEYRLATNASQAGVEKILSALEIPDVGNLSQVVVMKSKNDQGITNKCKMNLQDNNGNDIGFIGFHQFNNIAKLVASNWYNRQIERSSRTLGCSWEFIPVDDGWGERPL

SEQ ID NO: 161 - protein, 43 aa, Clostridium botulinum
MKINGNLNIDSPVDNKNVAIVRSRKSDVFFKAFQVAPNIWIVP

SEQ ID NO: 162 - protein, 1280 aa, Clostridium botulinum
MPVVINSFNYNDPVNDETILYMQKPYEERSRKYYKAFEIMPNVWIMPERDTIGTKPDEFQVPDSLKNGSSAYYDPNYLTTDAEKDRYLKTMIKLFNRINSNPTGKVLLEEVSNARPYLGDDDTLINEFLPVNVTTSVNIKFSTDVESSIISNLLVLGAGPDIFKAYCTPLVRFNKSDKLIEPSNHGFGSINILTFSPEYEHIFNDISGGNHNSTESFIADPAISLAHELIHALHGLYGAKAVTHKESLVAERGPLMIAEKPIRLEEFLTFGGEDLNIIPSAMKEKIYNDLLANYEKIATRLREVNTAPPGYDINEYKDYFQWKYGLDRNADGSYTVNRNKFNEIYKKLYSFTEIDLANKFKVKCRNTYFIKYGFVKVPNLLDDDIYTVSEGFNIGNLAVNNRGQNINLNPKIIDSIPDKGLVEKIIKFCKSIIPRKGTKQSPSLCIRVNNRELFFVASESSYNESDINTPKEIDDTTNLNNNYRNNLDEVILDYNSETIPQISNRTLNTLVQDNSYVPRYDSNGTSEIEEYDVVDFNVFFYLHAQKVPEGETNISLTSSIDTALLEESKVYTFFSSEFIDTINKPVNAALFIDWISKVIRDFTTEATQKSTVDKIADISLIVPYVGLALNIVIEAEKGNFEEAFELLGAGILLEFVPELTIPVILVFTIKSYIDSYENKNKAIKAINNSLIEREAKWKEIYSWIVSNWLTRINTQFNKRKEQMYQALQNQVDAIKTAIEYKYNNYTSDEKNRLESKYNINNIEEELNKKVSLAMKNIERFMTESSISYLMKLINEAEVGKLKEYDKHVKSDLLDYILYHKLILGEQTKELIDLVTSTLNSSIPFELSSYTNDKILIIYFNRLYKKIKDSSILDMRYENNKFIDISGYGSNISINGNVYIYSTNRNQFGIYSGRLSEVNIAQNNDIIYNSRYQNFSISFWVTIPKHYRPMNRNREYTIINCMGNNNSGWKISLRTIRDCEIIWTLQDTSGNKEKLIFRYEELASISDYINKWIFVTITNNRLGNSRIYINGNLIVEKSISNLGDIHVSDNILFKIVGCDDETYVGIRYFKVFNTELDKTEIETLYSNEPDPSILKDYWGNYLLYNKKYYLFNLLRKDKYITRNSGILNINQQRGVTGGISVFLNYKLYEGVEVIIRKNAPIDISNTDNFVRKNDLAYINVVDHGVEYRLYADISITKSEKIIKLIRTSNPNDSLGQIIVMDSIGNNCTMNFQNNDGSNIGLLGFHSDDLVASSWYYNHIRRNTSSNGCFWSFISKEHGWKE

SEQ ID NO: 163 - protein, 211 aa, Clostridium botulinum
AFKITDRIWIIPERYTFGYKPEDFNKSSGIFNRDVCEYYDPDYLNTNDKKNIFLQTMIKLFNRIKSKPLGEKLLEMIINGIPYLGDRRVPLEEFNTNIASVTVNKLISNPGEVERKKGIFANLIIFGPGPVLNENETIDIGIQNHFASREGFGGIMQMKFCPEYVSVFNNVQENKGASIFNRGGYFSDPSLILMHELIHVLHGLYGIKVDD

SEQ ID NO: 164 - protein, 1276 aa, Clostridium botulinum
MTWPVKDFNYSDPVNDNDILYLRIPQNKLITTPVKAFMITQNIWVIPERFSSDTNPSLSKPPRPTSKYQSYYDPSYLSTDEQKDTFLKGIIKLFKRINERDIGKKLINYLVVGSPFMGDSSTPEDTFDFTRHTTNIAVEKFENGSWKVTNIITPSVLIFGPLPNILDYTASLTLQGQQSNPSFEGFGTLSILKVAPEFLLTFSDVTSNQSSAVLGKSIFCMDPVIALMHELTHSLHQLYGINIPSDKRIRPQVSEGFFSQDGPNVQFEELYTFGGLDVEIIPQIERSQLREKALGHYKDIAKRLNNINKTIPSSWISNIDKYKKIFSEKYNFDKDNTGNFVVNIDKFNSLYSDLTNVMSEVVYSSQYNVKNRTHYFSRHYLPVFANILDDNIYTIRDGFNLTNKGFNIENSGQNIERNPALQKLSSESVVDLFTKVCLRLTKNSRDDSTCIKVKNNRLPYVADKDSISQEIFENKIITDETNVQNYSDNFSLDESILDGQVPINPEIVDPLLPNVNMEPLNLPGEEIVFYDDITKYVDYLNSYYYLESQKLSNNVENITLTTSVEEALGYSNKIYTFLPSLAEKVNKGVQAGLFLNWANEVVEDFTTNIMKKDTLDKISDVSVIIPYIGPALNIGNSALRGNFKQAFATAGVAFLLEGFPEFTIPALGVFTFYSSIQEREKIIKTIENCLEQRVKRWKDSYQWMVSNWLSRITTQFNHINYQMYDSLSYQADAIKAKIDLEYKKYSGSDKENIKSQVENLKNSLDVKISEAMNNINKFIRECSVTYLFKNMLPKVIDELNKFDLRTKTELINLIDSHNIILVGEVDRLKAKVNESFENTMPFNIFSYTNNSLLKDIINEYFNSINDSKILSLQNKKNALVDTSGYNAEVRVGDNVQLNTIYTNDFKLSSSGDKIIVNLNNNILYSAIYENSSVSFWIKISKDLTNSHNEYTIINSIEQNSGWKLCIRNGNIEWILQDVNRKYKSLIFDYSESLSHTGYTNKWFFVTITNNIMGYMKLYINGELKQSQKIEDLDEVKLDKTIVFGIDENIDENQMLWIRDFNIFSKELSNEDINIVYEGQILRNVIKDYWGNPLKFDTEYYIINDNYIDRYIAPESNVLVLVRYPDRSKLYTGNPITIKSVSDKNPYSRILNGDNIILHMLYNSRKYMIIRDTDTIYATQGGECSQNCVYALKLQSNLGNYGIGIFSIKNIVSKNKYCSQIFSSFRENTMLLADIYKPWRFSFKNAYTPVAVTNYETKLLSTSSFWKFISRDPGWVE

SEQ ID NO: 165 - protein, 1285 aa, Clostridium botulinum
MTWPVKDFNYSDPVNDNDILYLRIPQNKLITTPVKAFMITQNIWVIPERFSSDTNPSLSKPPRPTSKYQSYYDPSYLSTDEQKDTFLKGIIKLFKRINERDIGKKLINYLVVGSPFMGDSSTPEDTFDFTRHTTNIAVEKFENGSWKVTNIITPSVLIFGPLPNILDYTASLTLQGQQSNPSFEGFGTLSILKVAPEFLLTFSDVTSNQSSAVLGKSIFCMDPVIALMHELTHSLHQLYGINIPSDKRIRPQVSEGFFSQDGPNVQFEELYTFGGSDVEIIPQIERLQLREKALGHYKDIAKRLNNINKTIPSSWSSNIDKYKKIFSEKYNFDKDNTGNFVVNIDKFNSLYSDLTNVMSEVVYSSQYNVKNRTHYFSKHYLPVFANILDDNIYTIINGFNLTTKGFNIENSGQNIERNPALQKLSSESVVDLFTKVCLRLTRNSRDDSTCIQVKNNTLPYVADKDSISQEIFESQIITDETNVENYSDNFSLDESILDAKVPTNPEAVDPLLPNVNMEPLNVPGEEEVFYDDITKDVDYLNSYYYLEAQKLSNNVENITLTTSVEEALGYSNKIYTFLPSLAEKVNKGVQAGLFLNWANEVVEDFTTNIMKKDTLDKISDVSAIIPYIGPALNIGNSALRGNFKQAFATAGVAFLLEGFPEFTIPALGVFTFYSSIQEREKIIKTIENCLEQRVKRWKDSYQWMVSNWLSRITTRFNHISYQMYDSLSYQADAIKAKIDLEYKKYSGSDKENIKSQVENLKNSLDVKISEAMNNINKFIRECSVTYLFKNMLPKVIDELNKFDLKTKTELINLIDSHNIILVGEVDRLKAKVNESFENTIPFNIFSYTNNSLLKDMINEYFNSINDSKILSLQNKKNTLMDTSGYNAEVRVEGNVQLNPIFPFDFKLGSSGDDRGKVIVTQNENIVYNAMYESFSISFWIRINKWVSNLPGYTIIDSVKNNSGWSIGIISNFLVFTLKQNENSEQDINFSYDISKNAAGYNKWFFVTITTNMMGNMMIYINGKLIDTIKVKELTGINFSKTITFQMNKIPNTGLITSDSDNINMWIRDFYIFAKELDDKDINILFNSLQYTNVVKDYWGNDLRYDKEYYMINVNYMNRYMSKKGNGIVFNTRKNNNDFNEGYKIIIKRIRGNTNDTRVRGENVLYFNTTIDNKQYSLGMYKPSRNLGTDLVPLGALDQPMDEIRKYGSFIIQPCNTFDYYASQLFLSSNATTNRLGILSIGSYSFKLGDDYWFNHEYLIPVIKIEHYASLLESTSTHWVFVPASE

SEQ ID NO: 166 - protein, 1285 aa, Clostridium botulinum
MTWPVKDFNYSDPVNDNDILYLRIPQNKLITTPVKAFMITQNIWVIPERFSSDTNPSLSKPPRPTSKYQSYYDPSYLSTDEQKDTFLKGIIKLFKRINERDIGKKLINYLVVGSPFMGDSSTPEDTFDFTRHTTNIAVEKFENGSWKVTNIITPSVLIFGPLPNILDYTASLTLQGQQSNPSFEGFGTLSILKVAPEFLLTFSDVTSNQSSAVLGKSIFCMDPVIALMHELTHSLHQLYGINIPSDKRIRPQVSEGFFSQDGPNVQFEELYTFGGSDVEIIPQIERLQLREKALGHYKDIAKRLNNINKTIPSSWSSNIDKYKKIFSEKYNFDKDNTGNFLVNIDKFNSLYSDLTNVMSEVIYSSQYNVKNRTHYFSKHYLPVFANILDDNIYTIINGFNLTTKGFNIENSGQNIERNPALQKLSSESVVDLFTKVCLRLTRNSRDDSTCIQVKNNTLPYVADKDSISQEIFESQIITDETNVENYSDNFSLDESILDAKVPTNPEAVDPLLPNVNMEPLNVPGEEEVFYDDITKDVDYLNSYYYLEAQKLSNNVENITLTTSVEEALGYSNKIYTFLPSLAEKVNKGVQAGLFLNWANEVVEDFTTNIMKKDTLDKISDVSAIIPYIGPALNIGNSALRGNFKQAFATAGVAFLLEGFPEFTIPALGVFTFYSSIQEREKIIKTIENCLEQRVKRWKDSYQWMVSNWLSRITTQFNHISYQMYDSLSYQADAIKAKIDLEYKKYSGSDKENIKSQVENLKNSLDVKISEAMNNINKFIRECSVTYLFKNMLPKVIDELNKFDLKTKTELINLIDSHNIILVGEVDRLKAKVNESFENTIPFNIFSYTNNSLLKDMINEYFNSINDSKILSLQNKKNTLMDTSGYNAEVRVEGNVQLNPIFPFDFKLGSSGDDRGKIIVTQNENIVYNAMYESFSISFWIRINKWVSNLPGYTIIDSVKNNSGWSIGIISNFLVFTLKQNENSEQDINFSYDISKNAAGYNKWFFVTITTNMMGNMMIYINGKLIDTIKVKELTGINFSKTITFQMNKIPNTGLITSDSDNINMWIRDFYIFAKELDDKDINILFNSLQYTNVVKDYWGNDLRYDKEYYMINVNYMNRYMSKKGNGIVFNTRKNNNDFNEGYKIIIKRIRGNTNDTRVRGENVLYFNTTIDNKQYSLGMYKPSRNLGTDLVPLGALDQPMDEIRKYGSFIIQPCNTFDYYASQLFLSSNATTNRLGILSIGSYSFKLGDDYWFNHEYLIPVIKIEHYASLLESTSTHWVFVPASE

SEQ ID NO: 167 - protein, 1275 aa, Clostridium botulinum D phage
MTWPVKDFNYSDPVNDNDILYLRIPQNKLITTPVKAFMITQNIWVIPERFSSDTNPSLSKPPRPTSKYQSYYDPSYLSTDEQKDTFLKGIIKLFKRINERDIGKKLINYLVVGSPFMGDSSTPEDTFDFTRHTTNIAVEKFENGSWKVTNIITPSVLIFGPLPNILDYTASLTLQGQQSNPSFEGFGTLSILKVAPEFLLTFSDVTSNQSSAVLGKSIFCMDPVIALMHELTHSLHQLYGINIPSDKRIRPQVSEGFFSQDGPNVQFEELYTFGGLDVEIIPQIERSQLREKALGHYKDIAKRLNNINKTIPSSWISNIDKYKKIFSEKYNFDKDNTGNFVVNIDKFNSLYSDLTNVMSEVVYSSQYNVKNRTHYFSRHYLPVFANILDDNIYTIRDGFNLTNKGFNIENSGQNIERNPALQKLSSESVVDLFTKVCLRLTKNSRDDSTCIKVKNNRLPYVADKDSISQEIFENKIITDETNVQNYSDKFSLDESILDGQVPINPEIVDPLLPNVNMEPLNLPGEEIVFYDDITKYVDYLNSYYYLESQKLSNNVENITLTTSVEEALGYSNKIYTFLPSLAEKVNKGVQAGLFLNWANEVVEDFTTNIMKKDTLDKISDVSVIIPYIGPALNIGNSALRGNFNQAFATAGVAFLLEGFPEFTIPALGVFTFYSSIQEREKIIKTIENCLEQRVKRWKDSYQWMVSNWLSRITTQFNHINYQMYDSLSYQADAIKAKIDLEYKKYSGSDKENIKSQVENLKNSLDVKISEAMNNINKFIRECSVTYLFKNMLPKVIDELNKFDLRTKTELINLIDSHNIILVGEVDRLKAKVNESFENTMPFNIFSYTNNSLLKDIINEYFNSINDSKILSLQNKKNALVDTSGYNAEVRVGDNVQLNTIYTNDFKLSSSGDKIIVNLNNNILYSAIYENSSVSFWIKISKDLTNSHNEYTIINSIEQNSGWKLCIRNGNIEWILQDVNRKYKSLIFDYSESLSHTGYTNKWFFVTITNNIMGYMKLYINGELKQSQKIEDLDEVKLDKTIVFGIDENIDENQMLWIRDFNIFSKELSNEDINIVYEGQILRNVIKDYWGNPLKFDTEYYIINDNYIDRYIAPESNVLVLVQYPDRSKLYTGNPITIKSVSDKNPYSRILNGDNIILHMLYNSRKYMIIRDTDTIYATQGGECSQNCVYALKLQSNLGNYGIGIFSIKNIVSKNKYCSQIFSSFRENTMLLADIYKPWRFSFKNAYTPVAVTNYETKLLSTSSFWKFISRDPGWV

SEQ ID NO: 168 - protein, 1276 aa, Clostridium botulinum; identical to SEQ ID NO: 4

SEQ ID NO: 169 - protein, 369 aa, Clostridium botulinum
RLLSTFTEYIKNIINTSILNLRYESNHLIDLSRYASKINIKYFNSISLNNEYTIINCMENNSGWKVSLNYGEIIWTLQDTQEIKQRVVFKYSQMINISDYINRWIFVTITNNRLNNSKIYINGRLIDQKPISNLGNIHASNNIMFKLDGCRDTHRYIWIKYFNLFDKELNEKEIKDLYDNQSNSGILKDFWGDYLQYDKPYYMLNLYDPNKYVDVNNVGIRGYMYLKGPRGSVMTTNIYLNSSLYRGTKFIIKKYASGNKDNIVRNNDRVYINVVVKNKEYRLATNASQAGVEKILSALEIPDVGNLSQVVVMKSKNDQGITNKCKMNLQDNNGNDIGFIGFHQFNNIAKLVASNWYNRQIERSSRTLG

SEQ ID NO: 170 - protein, 623 aa, Clostridium botulinum
MSLSIKELYYTKDKSINNVNLADGNYVVNRGDGWILSRQNQNLGGNISNNGCTAIVGDLRIRETATPYYYPTASFNEEYIKNNVQNVFANFTEASEIPIGFEFSKTAPSNKSLYMYLQYTYIRYEIIKVLQNTVTERAVLYVPSLGYVKSIEFNSEEQIDKNFYFTSQDKCILNEKFIYKKIDDTITVKESKNSNNNINFNTSQTILPYPNGLYVINKGDGYMRTNDKDLIGTLLIESSTSGSIIQPRLRNTTRPLFNTSNPTIFSQEYTEARLNDAFNIQLFNTSTTLFKFVEEAPTNKNISMKVYNTYEKYELINYQNGNIDDKAEYYLPSLGKCEVSDAPSPQAPVVETPVDQDGFIQTGPNENIIVGVINPSENIEEISTPIPDDYTYNIPTSIQNNACYVLFKVNTTGVYKITTKNNLPPLIIYEAIGSSNRNMNSNNLSNDNIKAIKYITGLNRSDAKSYLIVSLFKDKNYYIRIPQISSSTTSQLIFKRELGNISDLADSTVNILDNLNTSGTHYYTRQSPDVGNYISYQLTIPGDFNNIASSIFSFRTRNNQGIGTLYRLTESINGYNLITINNYSDLLNNVEPISLLNGATYIFRVKVTELNNYNIIFDAYRNS

SEQ ID NO: 171 - protein, 623 aa, Clostridium botulinum; identical to SEQ ID NO: 170

SEQ ID NO: 172 - protein, 623 aa, Clostridium botulinum D phage
MSLSIKELYYTKDKSINNVNLADGNYVVNRGDGWILSRQNQNLGGNISNNGCTAIVGDLRIRETATPYYYPTASFNEEYIKNNVQNVFANFTEASEIPIGFEFSKTAPSNKSLYMYLQYTYIRYEIIKVLQNTVTEAAVLYVPSLGYVKSIEFNSEEQIDKNFYFTSQDKCILNEKFIYKKIDDTITVKESKNSNNNINFNTSQTILPYPNGLYVINKGDGYMRTNDKDLIGTLLIESSTSGSIIQPRLRNTTRPLFNTSNPTIFSQEYTEARLNDAFNIQLFNTSTTLFKFVEEAPTNKNISMKVYNTYEKYELINYQNGNIDDKAEYYLPSLGKCEVSDAPSPQAPVVETPVDQDGFIQTGPNENIIVGVINPSENIEEISTPIPDDYTYNIPTSIQNNACYVLFKVNTTGVYKITTKNNLPPLIIYEAIGSSNRNMNSNNLSNDNIKAIKYITGLNRSDAKSYLIVSLFKDKNYYIRIPQISSSTTSQLIFKRELGNISDLADSTVNILDNLNTSGTHYYTRQSPDVGNYISYQLTIPGDFNNIASSIFSFRTRNNQGIGTLYRLTESINGYNLITINNYSDLLNNVEPISLLNGATYIFRVKVTELNNYNIIFDAYRNS

SEQ ID NO: 173 - protein, 366 aa, Clostridium botulinum
VQKENFKEAFELLGAGILLEFVPELLIPTILVFTIKSFIGSSENKNKIIKAINNSLMERETKWKEIYSWIVSNWLTRINTQFNKRKEQMYQALQNQVDAIKTVIEYKYNNYTSDERNRLESEYNINNIREELNKKVSLAMENIERFITESSIFYLMKLINEAKVSKLREYDEGVKEYLLDYISEHRSILGNSVQELNDLVTSTLNNSIPFELSSYTNDKILILYFNKLYKKIKDNSILDMRYENNKFIDISGYGSNISINGDVYIYSTNRNQFGIYSSKPSEVNIAQNNDIIYNGRYQNFSISFWVRIPKYFNKVNLNNEYTIIDCIRNNNSGWKISLNYNKIIWTLQDTAGNNQKLVFNYTQMIS

SEQ ID NO: 174 - protein, 369 aa, Clostridium botulinum
AEKGNFEEAFELLGVGILLEFVPELTIPVILVFTIKSYIDSYENKNKAIKAINNSLIEREAKWKEIYSWIVSNWLTRINTQFNKRKEQMYQALQNQVDAIKTAIEYKYNNYTSDEKNRLESEYNINNIEEELNKKVSLAMKNIERFMTESSISYLMKLINEAKVGKLKKYDNHVKSDLLNYILDHRSILGEQTNELSDLVTSTLNSSIPFELSSYTNDKILIIYFNRLYKKIKDSSILDMRYENNKFIDISGYGSNISINGNVYIYSTNRNQFGIYNSRLSEVNIAQNNDIIYNSRYQNFSISFWVRIPKHYKPMNHNREYTIINCMGNNNSGWKISLRTVRDCEIIWTLQDTSGNKENLIFRYEELNR

SEQ ID NO: 175 - protein, 361 aa, Clostridium botulinum
TAKGNFESAFEIAGSSILLEFIPELLIPVVGVFLLESYIDNKNKIIKTIDNALTKRVEKWIDMYGLIVAQWLSTVNTQFYTIKEGMYKALNYQAQALEEIIKYKYNIYSEEEKSNININFNDINSKLNEGINQAMDNINDFINECSVSYLMKKMIPLAVKKLLDFDNTLKKNLLNYIDENKLYLIGSVEDEKSKVDKYLKTIIPFDLSMYTNNEILIKIFNKYNSEILNNIILNLRYRDNNLIDLSGYGAKVEVYDGVKLNDKNQFKLTSSADSKIRVTQNQNIIFNSMFLDFSVSFWIRIPKYRNDDIQNYIHNEYTIINCMKNNSGWKISIRGNRIIWTLIDINGKTKSVFFEYNIRED

SEQ ID NO: 176 - protein, 361 aa, Clostridium botulinum
TAKGNFESAFEIAGSSILLEFIPELLIPVVGVFLLESYIDNKNKIIKTIDNALTKRVEKWIDMYGLIVAQWLSTVNTQFYTIKEGMYKALNYQAQALEEIIKYKYNIYSEEEKSNININFNDINSKLNDGINQAMDNINDFINECSVSYLMKKMIPLAVKKLLDFDNTLKKNLLNYIDENKLYLIGSVEDEKSKVDKYLKTIIPFDLSTYTNNEILIKIFNKYNSEILNNIILNLRYRDNNLIDLSGYGAKVEVYDGVKLNDKNQFKLTSSADSKIRVTQNQNIIFNSMFLDFSVSFWIRIPKYRNDDIQNYIHNEYTIINCMKNNSGWKISIRGNRIIWTLIDINGKTKSVFFEYNIRED

SEQ ID NO: 177 - protein, 573 aa, Clostridium tetani
RSLEYQVDAIKKIIDYEYKIYSGPDKEQIADEINNLKNKLEEKANKAMININIFMRESSRSFLVNQMINEAKKQLLEFDTQSKNILMQYIKANSKFIGITELKKLESKINKVFSTPIPFSYSKNLDCWVDNEEDIDVILKKSTILNLDINNDIISDISGFNSSVITYPDAQLVPGINGKAIHLVNNESSEVIVHKAMDIEYNDMFNNFTVSFWLRVPKVSASHLEQYGTNEYSIISSMKKHSLSIGSGWSVSLKGNNLIWTLKDSAGEVRQITFRDLPDKFNAYLANKWVFITITNDRLSSANLYINGVLMGSAEITGLGAIREDNNITLKLDRCNNNNQYVSIDKFRIFCKALNPKEIEKLYTSYLSITFLRDFWGNPLRYDTEYYLIPVASSSKDVQLKNITDYMYLTNAPSYTNGKLNIYYRRLYNGLKFIIKRYTPNNEIDSFVKSGDFIKLYVSYNNNEHIVGYPKDGNAFNNLDRILRVGYNAPGIPLYKKMEAVKLRDLKTYSVQLKLYDDKNASLGLVGTHNGQIGNDPNRDILIASNWYFNHLKDKILGCDWYFVPTDEGWTND

SEQ ID NO: 178 - protein, 432 aa, Clostridium botulinum
MSYTNDKILILYFNKLYKKIKDNSILDMRYENNKFIDISGYGSNISINGDVYIYSTNRNQFGIYSSKPSEVNIAQNNDIIYNGRYQNFSISFWVRIPKYFNKVNLNNEYTIIDCIRNNNSGWKISLNYNKIIWTLQDTAGNNQKLVFNYTQMISISDYINKWIFVTITNNRLGNSRIYINGNLIDEKSISNLGDIHVSDNILFKIVGCNDTRYVGIRYFKVFDTELGKTEIETLYSDEPDPSILKDFWGNYLLYNKRYYLLNLLRTDKSITQNSNFLNINQQRGVYQKPNIFSNTRLYTGVEVIIRKNGSTDISNTDNFVRKNDLAYINVVDRDVEYRLYADISIAKPEKIIKLIRTSNSNNSLGQIIVMDSIGNNCTMNFQNNNGGNIGLLGFHSNNLVASSWYYNNIRKNTSSNGCFWSFISKEHGWQEN

SEQ ID NO: 179 - protein, 438 aa, Clostridium botulinum
MARLLSTFTEYIKNIINTSILNLRYESNHLIDLSRYASKINIGSKVNFDPIDKNQIQLFNLESSKIEVILKNAIVYNSMYENFSTSFWIRIPKYFNSISLNNEYTIINCMENNSGWKVSLNYGEIIWTLQDTQEIKQRVVFKYSQMINISDYINRWIFVTITNNRLNNSKIYINGRLIDQKPISNLGNIHASNNIMFKLDGCRDTHRYIWIKYFNLFDKELNEKEIKDLYDNQSNSGILKDFWGDYLQYDKPYYMLNLYDPNKYVDVNNVGIRGYMYLKGPRGSVMTTNIYLNSSLYRGTKFIIKKYASGNKDNIVRNNDRVYINVVVKNKEYRLATNASQAGVEKILSALEIPDVGNLSQVVVMKSKNDQGITNKCKMNLQDNNGNDIGFIGFHQFNNIAKLVASNWYNRQIERSSRTLGCSWEFIPVDDGWGERPL

SEQ ID NO: 180 - protein, 441 aa, Clostridium botulinum
EDIDVILKKSTILNLDINNDIISDISGFNSSVITYPDAQLVPGINGKAIHLVNNEESEVIVHKAMDIEYNDMFNNFTVSFWLRVPKVSASHLEQYGTNEYSIISSMKKHSLSIGSGWSVSLKGNNLIWTLKDSAGEVRQITFRDLPDKFNAYLANKWVFITITNDRLSSANLYINGVLMGSAEITGLGAIREDNNITLKLDRCNNNNQYVSIDKFRIFCKALNPKEIEKLYTSYLSITFLRDFWGNPLRYDTEYYLIPVASSSKDVQLKNITDYMYLTNAPSYTNGKLNIYYRRLYNGLKFIIKRYTPNNEIDSFVKSGDFIKLYVSYNNNEHIVGYPKDGNAFNNLDRILRVGYNAPGIPLYKKMEAVKLRDLKTYSVQLKLYDDKNASLGLVGTHNGQIGNDPNRDILIASNWYFNHLKDKILGCDWYFVPTDEGWTND

SEQ ID NO: 181 - protein, 472 aa, Clostridium botulinum
MGSSHHHHHHSSGLVPRGSHMKNLDCWVDNEEDIDVILKKSTILNLDINNDIISDISGFNSSVITYPDAQLVPGINGKAIHLVNNESSEVIVHKAMDIEYNDMFNNFTVSFWLRVPKVSASHLEQYGTNEYSIISSMKKHSLSIGSGWSVSLKGNNLIWTLKDSAGEVRQITFRDLPDKFNAYLANKWVFITITNDRLSSANLYINGVLMGSAEITGLGAIREDNNITLKLDRCNNNNQYVSIDKFRIFCKALNPKEIEKLYTSYLSITFLRDFWGNPLRYDTEYYLIPVASSSKDVQLKNITDYMYLTNAPSYTNGKLNIYYRRLYNGLKFIIKRYTPNNEIDSFVKSGDFIKLYVSYNNNEHIVGYPKDGNAFNNLDRILRVGYNAPGIPLYKKMEAVKLRDLKTYSVQLKLYDDKNASLGLVGTHNGQIGNDPNRDILIASNWYFNHLKDKILGCDWYFVPTDEGWTND

SEQ ID NO: 182 - protein, 469 aa, Clostridium tetani
MGHGHHHHHHHHHHSSGHIEGRHMLDNEEDIDVILKKSTILNLDINNDIISDISGFNSSVITYPDAQLVPGINGKAIHLVNNESSEVIVHKAMDIEYNDMFNNFTVSFWLRVPKVSASHLEQYGTNEYSIISSMKKHSLSIGSGWSVSLKGNNLIWTLKDSAGEVRQITFRDLPDKFNAYLANKWVFITITNDRLSSANLYINGVLMGSAEITGLGAIREDNNITLKLDRCNNNNQYVSIDKFRIFCKALNPKEIEKLYTSYLSITFLRDFWGNPLRYDTEYYLIPVASSSKDVQLKNITDYMYLTNAPSYTNGKLNIYYRRLYNGLKFIIKRYTPNNEIDSFVKSGDFIKLYVSYNNNEHIVGYPKDGNAFNNLDRILRVGYNAPGIPLYKKMEAVKLRDLKTYSVQLKLYDDKNASLGLVGTHNGQIGNDPNRDILIASNWYFNHLKDKILGCDWYFVPTDEGWTND

SEQ ID NO: 183 - protein, 441 aa, Clostridium botulinum
EDIDVILKKSTILNLDINNDIISDISGFNSSVITYPDAQLVPGINGKAIHLVNNESSEVIVHKAMDIEYNDMFNNFTVSFWLRVPKVSASHLEQYGTNEYSIISSMKKHSLSIGSGWSVSLKGNNLIWTLKDSAGEVRQITFRDLPDKFNAYLANKWVFITITNDRLSSANLYINGVLMGSAEITGLGAIREDNNITLKLDRCNNNNQYVSIDKFRIFCKALNPKEIEKLYTSYLSITFLRDFWGNPLRYDTEYYLIPVASSSKDVQLKNITDYMYLTNAPSYTNGKLNIYYRRLYNGLKFIIKRYTPNNEIDSFVKSGDFIKLYVSYNNNEHIVGYPKDGNAFNNLDRILRVGYNAPGIPLYKKMEAVKLRDLKTYSVQLKLYDDKNASLGLVGTHNGQIGNDPNRDILIASNWYFNHLKDKILGCDWYFVPTDEGWTND

SEQ ID NO: 184 - protein, 452 aa, Clostridium botulinum
MKNLDCWVDNEEDIDVILKKSTILNLDINNDIISDISGFNSSVITYPDAQLVPGINGKAIHLVNNESSEVIVHKAMDIEYNDMFNNFTVSFWLRVPKVSASHLEQYGTNEYSIISSMKKHSLSIGSGWSVSLKGNNLIWTLKDSAGEVRQITFRDLPDKFNAYLANKWVFITITNDRLSSANLYINGVLMGSAEITGLGAIREDNNITLKLDRCNNNNQYVSIDKFRIFCKALNPKEIEKLYTSYLSITFLRDFWGNPLRYDTEYYLIPVASSSKDVQLKNITDYMYLTNAPSYTNGKLNIYYRRLYNGLKFIIKRYTPNNEIDSFVKSGDFIKLYVSYNNNEHIVGYPKDGNAFNNLDRILRVGYNAPGIPLYKKMEAVKLRDLKTYSVQLKLYDDKNASLGLVGTHNGQIGNDPNRDILIASNWYFNHLKDKILGCDWYFVPTDEGWTND

SEQ ID NO: 185 - protein, 444 aa, Clostridium tetani
DNEEDIDVILKKSTILNLDINNDIISDISGFNSSVITYPDAQLVPGINGKAIHLVNNESSEVIVHKAMDIEYNDMFNNFTVSFWLRVPKVSASHLEQYGTNEYSIISSMKKHSLSIGSGWSVSLKGNNLIWTLKDSAGEVRQITFRDLPDKFNAYLANKWVFITITNDRLSSANLYINGVLMGSAEITGLGAIREDNNITLKLDRCNNNNQYVSIDKFRIFCKALNPKEIEKLYTSYLSITFLRDFWGNPLRYDTEYYLIPVASSSKDVQLKNITDYMYLTNAPSYTNGKLNIYYRRLYNGLKFIIKRYTPNNEIDSFVKSGDFIKLYVSYNNNEHIVGYPKDGNAFNNLDRILRVGYNAPGIPLYKKMEAVKLRDLKTYSVQLKLYDDKNASLGLVGTHNGQIGNDPNRDILIASNWYFNHLKDKILGCDWYFVPTDEGWTND

SEQ ID NO: 186 - protein, 451 aa, Clostridium tetani
KNLDCWVDNEEDIDVILKKSTILNLDINNDIISDISGFNSSVITYPDAQLVPGINGKAIHLVNNESSEVIVHKAMDIEYNDMFNNFTVSFWLRVPKVSASHLEQYDTNEYSIISSMKKYSLSIGSGWSVSLKGNNLIWTLKDSAGEVRQITFRDLSDKFNAYLANKWVFITITNDRLSSANLYINGVLMGSAEITGLGAIREDNNITLKLDRCNNNNQYVSIDKFRIFCKALNPKEIEKLYTSYLSITFLRDFWGNPLRYDTEYYLIPVAYSSKDVQLKNITDYMYLTNAPSYTNGKLNIYYRRLYSGLKFIIKRYTPNNEIDSFVRSGDFIKLYVSYNNNEHIVGYPKDGNAFNNLDRILRVGYNAPGIPLYKKMEAVKLRDLKTYSVQLKLYDDKDASLGLVGTHNGQIGNDPNRDILIASNWYFNHLKDKTLTCDWYFVPTDEGWTND

SEQ ID NO: 187 - protein, 56 aa, Clostridium botulinum
KKMIISNNIFISNCLTLSCGGKYICLSMKDENYNWMICNNESNIPKKAYLWTLKEV

SEQ ID NO: 188 - protein, 441 aa, Clostridium botulinum
YTNNTILIEIFNKYNSKILNNIILNLRYRDNNLIDLSGYGANVEVYDGVELNDKNQFKLTSSTNSEIRVTQNQNIIFNSMFLDFSVSFWIRIPKYKNDGIQNYIHNEYTIINCIKNNSGWKISIRGNRIIWTLTDINGKTKSVFFEYSIREDISDYINRWFFVTITNNSDNAKIYINGKLESNIDIKDIGEVIANGEIIFKLDGDIDRTQFIWMKYFSIFNTELSQSNIKEIYKIQSYSEYLKDFWGNPLMYNKEYYMFNAGNKNSYIKLKKDSSVGEILTRSKYNQNSNYINYRNLYIGEKFIIRRKSNSQSINDDIVRKEDYIYLDFFNSNREWRVYAYKDFKEEEKKLVLANIYDSNEFYKTIQIKEYDEQPTYSCQLLFKKDEESTDEIGLIGIHRFYESGIVLKDYKNYFCISKWYLKEVKRKPYNPNLGCNWQFI

We claim:

1. A composition for translocating an entity across a non-keratinized epithelium of an animal, the composition comprising an entity linked to a carboxyterminal fragment of the HC of a Clostridium botulinum neurotoxin (BoNT), wherein the size of the entity is not greater than the lumenal capacity of vesicles of cells of the epithelium.

2. The composition of claim 1, wherein the BoNT is selected from the group consisting of the BoNTs of the serotypes A, B, and E.

3. The composition of claim 1, wherein the fragment comprises at least about 2% by molecular mass of the HC of a Clostridium botulinum neurotoxin (BoNT).

4. The composition of claim 1, wherein the fragment comprises at least about 5% by molecular mass of the HC of a Clostridium botulinum neurotoxin (BoNT).

5. The composition of claim 1, wherein the fragment comprises at least about 30% by molecular mass of the HC of a Clostridium botulinum neurotoxin (BoNT).

6. The composition of claim 1, wherein the fragment comprises at least about 50% by molecular mass of the HC of a Clostridium botulinum neurotoxin (BoNT).

7. The composition of claim 1, wherein the fragment comprises about 20 to about 50 residues of the HC of a Clostridium botulinum neurotoxin (BoNT).

8. The composition of claim 1, wherein the fragment comprises at least about 35 amino acid residues of the HC of a Clostridium botulinum neurotoxin (BoNT).

9. The composition of claim 1, wherein the fragment comprises at least about 60 amino acid residues of the HC of a Clostridium botulinum neurotoxin.

10. The composition of claim 1, wherein the fragment comprises a domain selected from a β-trefoil domain and a lectin binding domain.

11. The composition of claim 1, wherein the fragment is linked to the entity by an intervening molecule.

12. The composition of claim 11, wherein the intervening molecule is selected from the group consisting of avidin, an antibody substance, and biotin.

13. The composition of claim 1, wherein the entity is linked to the fragment by a peptide bond.

14. The composition of claim 1, wherein the entity is linked near the amino terminal end of the fragment.

15. The composition of claim 1, wherein the entity is linked to the amino terminal end of the fragment.

16. The composition of claim 1, wherein the entity is a supramolecular complex.

17. The composition of claim 16, wherein the supramolecular complex is a multi-subunit protein, at least one sub-unit of the protein being linked to the fragment.

18. The composition of claim 1, wherein the entity is a polypeptide.

19. The composition of claim 18, wherein the polypeptide is an immunogenic portion of a protein associated with a pathogen of an animal.

20. The composition of claim 19, wherein the pathogen is selected from the group consisting of Bacillus anthracis, Bordetella pertussis, Brucella abortus, Brucella canis, Brucella melitensis, Brucella suis, Clostridium perfringens, Clostridium tetani, Corynebacterium diptheriae, Coxiella burnetii, Crimean-Congo hemorrhagic fever virus, Francisella tularensis, Pseudomonas pseudomallei, ricin, Rift Valley fever virus, the coronavirus that is the causative agent of Sudden Acute Respiratory Syndrome (SARS), saxitoxin, Staphylococcal enterotoxin B, trichothecene mycotoxins, Variola major Venezuelan equine encephalitis viruses, and Vibrio cholera.

21. The composition of claim 19, wherein the animal is a human and the pathogen is Clostridium botulinum neurotoxin.

22. The composition of claim 1, wherein the entity is an antibody substance.

23. The composition of claim 22, wherein the antibody substance is selected from the group consisting of a tetra-subunit immunoglobulin and a single-chain antibody.

24. The composition of claim 1, further comprising a plurality of entities.

25. The composition of claim 1, wherein the animal is a mammal.

26. The composition of claim 1, wherein the epithelium is selected from the group consisting of anal epithelium, gastrointestinal epithelium, nasal epithelium, ocular epithelium, pulmonary epithelium, and vaginal epithelium.

27. The composition of claim 1, wherein the molecular mass of the entity is no greater than about 1000 daltons.

28. The composition of claim 1, wherein the molecular mass of the entity is about 300 daltons to about 550 daltons.

29. The composition of claim 1, further comprising an auxiliary protein selected from the group consisting of polypeptides of SEQ ID NOs: 20 to 168, and 170 to 188.

30. A composition that elicits an immune response against an antigen in a vertebrate, the composition comprising at least one epitope of the antigen linked to a carboxyterminal fragment of the HC of a Clostridium botulinum neurotoxin (BoNT), wherein the size of the epitope is not greater than the lumenal capacity of vesicles of cells of the epithelium.

31. The composition of claim 30, wherein the immune response is a systemic immune response.

32. The composition of claim 30, wherein the immune response is a mucosal immune response.

33. The composition of claim 30, wherein the antigen is selected from antigens of Bacillus anthracis, Bordetella pertussis, Brucella abortus, Brucella canis, Brucella melitensis, Brucella suis, Clostridium perfringens, Clostridium tetani, Corynebacterium diptheriae, Coxiella burnetii, Crimean-Congo hemorrhagic fever virus, Francisella tularensis, Pseudomonas pseudomallei, ricin, Rift Valley fever virus, the coronavirus that is the causative agent of Sudden Acute Respiratory Syndrome (SARS), saxitoxin, smallpox virus, Staphylococcal enterotoxin B, trichothecene mycotoxins, Variola major Venezuelan equine encephalitis viruses, and Vibrio cholera.

34. The composition of claim 30, wherein the fragment comprises at least about 2% by molecular mass of the HC of a Clostridium botulinum neurotoxin (BoNT).

35. The composition of claim 30, wherein the fragment comprises at least about 5% by molecular mass of the HC of a Clostridium botulinum neurotoxin (BoNT).

36. The composition of claim 30, wherein the fragment comprises at least about 30% by molecular mass of the HC of a Clostridium botulinum neurotoxin (BoNT).

37. The composition of claim 30, wherein the fragment comprises at least about 50% by molecular mass of the HC of a Clostridium botulinum neurotoxin (BoNT).

38. The composition of claim 30, wherein the fragment comprises about 20 to about 50 residues of the HC of a Clostridium botulinum neurotoxin (BoNT).

39. The composition of claim 30, wherein the fragment comprises at least about 35 amino acid residues of the HC of a Clostridium botulinum neurotoxin (BoNT).

40. The composition of claim 30, wherein the fragment comprises at least about 60 amino acid residues of the HC of a Clostridium botulinum neurotoxin.

41. A composition that elicits an immune response against Botulinum neurotoxin in a vertebrate, the composition comprising a carboxyterminal fragment of the HC of a Clostridium botulinum neurotoxin (BoNT).

42. The composition of claim 41, wherein the immune response is a systemic immune response.

43. The composition of claim 41, wherein the immune response is a mucosal immune response.

44. The composition of claim 41, wherein the fragment comprises at least about 2% by molecular mass of the HC of a Clostridium botulinum neurotoxin (BoNT).

45. The composition of claim 41, wherein the fragment comprises at least about 5% by molecular mass of the HC of a Clostridium botulinum neurotoxin (BoNT).

46. The composition of claim 41, wherein the fragment comprises at least about 30% by molecular mass of the HC of a Clostridium botulinum neurotoxin (BoNT).

47. The composition of claim 41, wherein the fragment comprises at least about 50% by molecular mass of the HC of a Clostridium botulinum neurotoxin (BoNT).

48. A vaccine comprising an antigen linked to a carboxyterminal fragment of HC of a Clostridium botulinum neurotoxin (BoNT), wherein the antigen induces protective immunity against a pathogen of a vertebrate when the antigen is delivered to the circulation of the vertebrate.

49. The vaccine of claim 48, formulated for administration to a human by a route selected from the group consisting of anal, nasal, pulmonary, ocular, oral and vaginal routes.

50. The vaccine of claim 48, comprising a plurality of antigens that induce immunity against a plurality of pathogens, wherein each antigen is linked to a fragment of a HC of Clostridium botulinum neurotoxin (BoNT).

51. A vaccine comprising an antigen linked to a carboxyterminal fragment of a HC of a Clostridium botulinum neurotoxin (BoNT), wherein the antigen induces protective immunity against Clostridium botulinum neurotoxin in a vertebrate when the antigen is delivered to the circulation of the vertebrate.

52. A composition that elicits an immune response against an antigen when the antigen is contacted with a non-keratinized epithelium of a vertebrate, the composition comprising at least one epitope of the antigen linked to a carboxyterminal fragment of the HC a Clostridium botulinum neurotoxin (BoNT).

53. A method of translocating an entity across a non-keratinized epithelium of an animal, wherein the size of the entity is not greater than the lumenal capacity of vesicles of cells of the epithelium, the method comprising contacting the epithelium with a composition comprising the entity linked to a carboxyterminal fragment of the HC of a Clostridium botulinum neurotoxin (BoNT).

54. The method of claim 53, wherein the BoNT is selected from the group consisting of the BoNTs of the serotypes A, B, and E.

55. The method of claim 53, wherein the fragment comprises at least about 2% by molecular mass of the HC of a Clostridium botulinum neurotoxin (BoNT).

56. The method of claim 53, wherein the fragment comprises at least about 5% by molecular mass of the HC of a Clostridium botulinum neurotoxin (BoNT).

57. The method of claim 53, wherein the fragment comprises at least about 30% by molecular mass of the HC of a Clostridium botulinum neurotoxin (BoNT).

58. The method of claim 53, wherein the fragment comprises at least about 50% by molecular mass of the HC of a Clostridium botulinum neurotoxin (BoNT).

59. The method of claim 53, wherein the fragment comprises about 20 to about 50 residues of the HC of a Clostridium botulinum neurotoxin (BoNT).

60. The method of claim 53, wherein the fragment comprises at least about 35 amino acid residues of the HC of a Clostridium botulinum neurotoxin (BoNT).

61. The method of claim 53, wherein the fragment comprises at least about 60 amino acid residues of the HC of a Clostridium botulinum neurotoxin.

62. The method of claim 53, wherein the fragment is linked to the entity by an intervening molecule.

63. The method of claim 61, wherein the intervening molecule is selected from the group consisting of avidin, an antibody substance, and biotin.

64. The method of claim 53, wherein the entity is linked to the fragment by a peptide bond.

65. The method of claim 53, wherein the entity is linked near the amino terminal end of the fragment.

66. The method of claim 53, wherein the entity is linked to the amino terminal end of the fragment.

67. The method of claim 53, wherein the entity is a supramolecular complex.

68. The method of claim 53, wherein the supramolecular complex is a multi-subunit protein, at least one sub-unit of the protein being linked to the fragment.

69. The method of claim 53, wherein the entity is a polypeptide.

70. The method of claim 69, wherein the polypeptide is an immunogenic portion of a protein associated with a pathogen of an animal.

71. The method of claim 69, wherein the pathogen is selected from the group consisting of Bacillus anthracis, Bordetella pertussis, Brucella abortus, Brucella canis, Brucella melitensis, Brucella suis, Clostridium perfringens, Clostridium tetani, Corynebacterium diptheriae, Coxiella burnetii, Crimean-Congo hemorrhagic fever virus, Francisella tularensis, Pseudomonas pseudomallei, ricin, Rift Valley fever virus, the coronavirus that is the causative agent of Sudden Acute Respiratory Syndrome (SARS), saxitoxin, smallpox virus, Staphylococcal enterotoxin B, trichothecene mycotoxins, Variola major, Venezuelan equine encephalitis viruses, and Vibrio cholera.

72. The method of claim 69, wherein the animal is a human and the pathogen is Clostridium botulinum neurotoxin.

73. The method of claim 53, wherein the entity is an antibody substance.

74. The method of claim 53, wherein the antibody substance is selected from the group consisting of a tetra-subunit immunoglobulin and a single-chain antibody.

75. The method of claim 53 further comprising a plurality of entities.

76. The method of claim 53 wherein the animal is a mammal.

77. The method of claim 54, wherein the composition further comprises an auxiliary protein selected from the group consisting of the polypeptides SEQ ID NOs: 20 to 168, and 170 to 188.

78. A method of inducing an immune response against an entity in a vertebrate, the method comprising
a) linking the entity to a carboxyterminal fragment of the HC of a Clostridium botulinum neurotoxin (BoNT), wherein the size of the entity is not greater than the lumenal capacity of vesicle cells of the epithelium; and
b) contacting the fragment-linked entity with the epithelium.

79. The method of claim 78, wherein the vertebrate is a human.

80. The method of claim 79, wherein the entity is an antigen of a human pathogen.

81. A method of inducing an immune response against Clostridium neurotoxin (BoNT) in a vertebrate, the method comprising contacting a composition to an epithelium of a vertebrate, wherein the composition comprises an entity linked to a carboxyterminal fragment of HC of a Clostridium botulinum neurotoxin (BoNT) and the entity is an antigen that induces protective immunity against botulinum neurotoxin in a vertebrate when the antigen is delivered to the circulation of the vertebrate.

82. A pharmaceutical composition for rapid delivery of an entity to the bloodstream of a vertebrate, the composition comprising the entity linked to a carboxyterminal fragment of the HC of Clostridium botulinum neurotoxin (BoNT), wherein the composition is formulated for pulmonary administration.

83. A pharmaceutical composition for rapid delivery of an entity to the bloodstream of a vertebrate, the composition comprising the entity linked to a carboxyterminal fragment of the HC of Clostridium botulinum neurotoxin (BoNT), wherein the composition is formulated for oral administration.

84. A foodstuff, wherein the genome of an ingredient of the foodstuff comprises a polynucleotide expressibly encoding a protein that comprises a therapeutic or an immunogenic polypeptide linked to a carboxyterminal fragment of the HC of a Clostridium botulinum neurotoxin.

85. A translocating polypeptide that comprises an immunogenic polypeptide linked to a carboxyterminal fragment of the HC of a Clostridium botulinum neurotoxin.
